(19) United States
(12) Patent Application Publication
(10) Pub. No.: US 2024/0294906 A1
(43) Pub. Date: Sep. 5, 2024

(54) ATXN2 IRNA COMPOSITIONS AND METHODS OF USE THEREOF FOR TREATING OR PREVENTING ATXN2-ASSOCIATED NEURODEGENERATIVE DISEASES

(71) Applicant: Alnylam Pharmaceuticals, Inc., Cambridge, MA (US)

(72) Inventors: Elane Fishilevich, Cambridge, MA (US); Mark Keating, Cambridge, MA (US); Stuart Milstein, Cambridge, MA (US); Mark Schlegel, Cambridge, MA (US); Adam Castoreno, Cambridge, MA (US); Charalambos Kaittanis, Cambridge, MA (US); Sarah Hyde, Cambridge, MA (US); Alex Eaton, Cambridge, MA (US); James McIninch, Cambridge, MA (US); Jason Gilbert, Cambridge, MA (US)

(73) Assignee: Alnylam Pharmaceuticals, Inc., Cambridge, MA (US)

(21) Appl. No.: 18/007,007

(22) PCT Filed: Jul. 28, 2021
(86) PCT No.: PCT/US2021/043429

§ 371 Date: Jan. 26, 2023

Related U.S. Application Data
(60) Provisional application No. 63/058,119, filed on Jul. 29, 2020.
(60) Provisional application No. 63/146,689, filed on Feb. 7, 2021.

(51) Int. Cl. C12N 15/113; A61K 45/06; A61P 25/28

(52) U.S. Cl. CPC C12N 15/113; A61K 45/06; A61P 25/28; C12N 2310/11; C12N 2310/3515; C12N 2320/32

(57) ABSTRACT

The disclosure relates to double stranded ribonucleic acid (dsRNAi) agents and compositions targeting an ATXN2 gene, as well as methods of inhibiting expression of an ATXN2 gene and methods of treating subjects having an ATXN2-associated neurodegenerative disease or disorder, e.g., SCAs and ALS, using such dsRNAi agents and compositions.

### CROSS REFERENCE TO RELATED APPLICATIONS

[0001] This application claims the benefit of U.S. Provisional Application No. 63/058,119, filed Jul. 29, 2020, entitled “ATXN2 iRNA Compositions and Methods of Use Thereof for Treating or Preventing ATXN2-Associated Neurodegenerative Diseases,” and to U.S. Provisional Application No. 63/146,689, filed Feb. 7, 2021, also entitled “ATXN2 iRNA Compositions and Methods of Use Thereof for Treating or Preventing ATXN2-Associated Neurodegenerative Diseases.” The entire contents of the aforementioned applications are incorporated herein by reference.

### FIELD OF THE INVENTION

[0002] The instant disclosure relates generally to ATXN2-targeting RNAi agents and methods.

### SEQUENCE LISTING

[0003] The instant application contains a Sequence Listing which has been filed electronically in ASCII format and is hereby incorporated by reference in its entirety. Said ASCII copy, created on Jul. 28, 2021, is named BN00005_0142_ALN_355WO01_SL.txt and is 1.14 MB in size.

### BACKGROUND OF THE INVENTION

[0004] Spinocerebellar ataxias (SCAs) describe a large group of neurodegenerative disorders that affect movement, with more than 40 autosomal dominant SCAs described. As implied in the name, these disorders are characterized by progressive degeneration of the cerebellum and spinal motor neurons; however, both the affected brain regions and the clinical features of SCAs vary depending on the subtype. Ataxia—the key feature of SCAs—is manifested as dysfunction of motor coordination affecting gait, balance and speech. While the initial symptoms of SCAs are predominantly cerebellar, the neuronal degeneration in SCA also affects brainstem, pyramidal and extrapyramidal neurons, oculomotor system, lower motor neurons, and peripheral nerves. Oculomotor symptoms include progressive external ophthalmoplegia (weakness of the eye muscles) and diplopia (double vision); the pyramidal symptoms include spasticity, hyperreflexia, and weakness; extrapyramidal symptoms include dystonia (continuous spasms and muscle contractions), tremors, bradykinesia (slowness of movement) and other symptoms that may resemble Parkinson's disease (Bettencourt and Lima (2011) Orphanet journal ofrare diseases 6, 35-35). No disease modifying treatments exist for SCAs; however, physical therapy may improve symptoms (Ashizawa et al. (2018) Nat Rev Neurol 14, 590-605).

[0005] The Ataxin 2 (ATXN2) gene region covers approximately 147 kb; the transcript contains 25 exons, and 3 mRNA isoforms may be produced (isoform 1 transcript NM_002973.3 which encodes polypeptide NP_002964.3, isoform 2 transcript NM_001310121.1 which encodes polypeptide NP_001297050.1, and isoform 3 transcript NM_001310123.1 which encodes polypeptide NP_001297052.1) (each of the Accession Numbers is incorporated herein by reference in the form available on the filing date of the instant application). Five protein isoforms of ATXN2 have been described in UniProt. The longest ATXN2 isoform encodes an approximately 140 KDa protein (Isoform 1 UniProt: Q99700-1, 1,313 amino acids). Other ATXN2 isoforms in UniProt include: Isoform 2 UniProt: Q99700-2 of 1,313 amino acids; Isoform 3 UniProt: Q99700-3 of 258 amino acids; Isoform 4 UniProt: Q99700-4 of 1,243 amino acids; and Isoform 5 UniProt: Q99700-5 of 1,006 amino acids. Exon 2 of wildtype ATXN2 Q99700-1 contains a stretch of 22 to 31 glutamines (polyQ), encoded by imperfect CAG repeats; the most common sequence is (CAG)₈(CAA)₁(CAG)₄(CAA)₁(CAG)₈. The CAA interruptions are believed to confer stability to this repeat region (Choudhry et al. (2001) Hum Mol Genet 10, 2437-2446). The 22 polyQ repeat allele represents more than 90% of normal individuals worldwide, followed by the 23 and the 27 repeat alleles (Antenora et al. (2017) Annals of clinical and translational neurology 4, 687-695; Pulst et al. (1996) Nat Genet 14, 269-276). The disease states associated with ATXN2 show expanded polyQ repeats.

[0006] Expansion of the polyQ repeat to 34 or beyond is associated with spinocerebellar ataxia 2 (SCA2) (Pulst et al. (1996) Nat Genet 14, 269-276). Although 33 repeats may be sufficient to manifest late-onset SCA2 (Fernandez et al. (2000) Neurology 55, 569-572) and 31 repeat expansion may act as a recessive allele for SCA2 (Pulst (2018) Neurology Genetics 4, e299). The most common SCA2-associated alleles have 37-39 repeats; longer CAG repeat expansions are associated with early onset.

[0007] SCA2 is one of the most common spinocerebellar ataxias. The average onset of SCA2 is in the fourth decade of life, with up to a quarter of patients having onset between 10 to 25 years of age (Antenora et al. (2017) Annals of clinical and translational neurology 4, 687-695). The clinical features include progressive gait ataxia, dysarthria, dysmetria, tremor, abnormal eye movements (slow saccades and supranuclear ophthalmoplegia), and peripheral neuropathy. Signs of pyramidal tract impairment affect about one-fourth of the patients. Autonomic dysfunctions are also common; these may include postural hypotension, gastrointestinal alterations, sexual dysfunction, increased salivation, sweating, and lacrimation (Id.). The disease progresses to the use of the cane, walker, and wheelchair that occurs within 12 to 25 years on average after disease onset. The mean progression rate is 1.49 (±0.07 SE) per year at the Scale for Assessment and Rating of Ataxia (SARA) (Schmitz-Hubsch et al. (2006) Neurology 66, 1717-1720) (Jacobi et al. (2015) Lancet Neurol 14, 1101-1108).

[0008] Intermediate expansions of polyQ in ATXN2 are associated with ALS (Elden et al. (2010) Nature 466, 1069-1075). Specifically, polyQ expansions between 29 and 33 repeats show correlation with amyotrophic lateral sclerosis (ALS) across multiple ethnic groups (Neuenschwander et al. (2014) JAMA Neurology 71, 1529-1534). ATXN2 interacts with TAR DNA binding protein (TDP-43), which is believed to be the driver in a large fraction of sporadic and familial ALS cases (Elden et al. (2010) Nature 466, 1069-1075). While the majority of ALS cases show accumulation of TDP-43, only a small fraction of ALS patients have mutations in TDP-43. Silencing of ATXN2 in TDP-43 mutant mice (Becker et al. (2017) Nature 544, 367) improves ALS phenotypes, supporting the role of ATXN2 in TDP-43 pathology. In addition to TDP-43, synergy of ATXN2 intermediate-length expansion and C9orf72 expansions in ALS and frontotemporal dementia (FTD) has also been suggested (Ciura et al. (2016) Autophagy 12, 1406-1408).

[0009] ATXN2 is ubiquitously expressed, with enrichment in the Purkinje cells of the cerebellum and spinal motor neurons. The polyQ expansion is believed to alter ATXN2 protein function, with gain of function activity contributing to the disease mechanism. The wild type ATXN2 protein is primarily in the Golgi complex (Huynh et al. (2003) Hum Mol Genet 12, 1485-1496). It has been observed the polyQ expansions drive accumulation of ATXN2 aggregates and changes in sub-cellular localization (Id.).

[0010] ATXN2 is an RNA binding protein whose activity in not well understood. ATXN2 knockout mice are viable with no obvious pathology, aside from susceptibility to obesity (Kiehl et al. (2006) Biochem Biophys Res Commun 339, 17-24). Moreover, knockdown of polyQ-expanded ATXN2 mRNA in the brain of two SCA2 mouse models increased motor function (Scoles et al. (2017) Nature 544, 362-366), an indication of improvement of SCA2 phenotypes.

[0011] There are no known cures for SCAs, and treatment options are limited, e.g., merely palliative. Thus, noting the described involvement of ATXN2 in SCAs, there remains a need for an agent that can selectively and efficiently silence the ATXN2 gene using the cell's own RNAi machinery that has both high biological activity and in vivo stability, and that can effectively inhibit expression of a target ATXN2 gene.

### BRIEF SUMMARY OF THE INVENTION

[0012] The present disclosure provides RNAi agent compositions which effect the RNA-induced silencing complex (RISC)-mediated cleavage of RNA transcripts of an Ataxin 2 (ATXN2) gene. The ATXN2 gene may be within a cell, e.g., a cell within a subject, such as a human. The present disclosure also provides methods of using the RNAi agent compositions of the disclosure for inhibiting the expression of an ATXN2 gene or for treating a subject who would benefit from inhibiting or reducing the expression of an ATXN2 gene, e.g., a subject suffering or prone to suffering from an ATXN2-associated neurodegenerative disease or disorder, e.g., spinocerebellar ataxias (SCAs), such as spinocerebellar ataxia 2 (SCA2), and Amyotrophic Lateral Sclerosis (ALS).

[0013] Accordingly, in one aspect, the instant disclosure provides a double stranded ribonucleic acid (RNAi) agent for inhibiting expression of ATXN2, where the dsRNA agent includes a sense strand and an antisense strand forming a double stranded region, where the sense strand harbors a nucleotide sequence including at least 15 contiguous nucleotides, with 0 or 1 mismatches, of a portion of the nucleotide sequence of SEQ ID NO: 1, or a nucleotide sequence having at least 90% nucleotide sequence identity to a portion of the nucleotide sequence of SEQ ID NO: 1, and the antisense strand harbors a nucleotide sequence including at least 15 contiguous nucleotides, with 0 or 1 mismatches, of the corresponding portion of the nucleotide sequence of SEQ ID NO: 2, or a nucleotide sequence having at least 90% nucleotide sequence identity to a portion of the nucleotide sequence of SEQ ID NO: 2.

[0014] In another aspect, the instant disclosure provides a double stranded ribonucleic acid (RNAi) agent for inhibiting expression of an ATXN2 gene, where the RNAi agent includes a sense strand and an antisense strand, and where the antisense strand includes a region of complementarity which includes at least 15 contiguous nucleotides differing by no more than 3 nucleotides (i.e., differing by 3, 2, 1, or 0 nucleotides) from any one of the antisense sequences listed in any one of Tables 2, 3, 5, 6, 9 or 10.

[0015] Optionally, the sense strand or the antisense strand is conjugated to one or more lipophilic moieties.

[0016] In certain embodiments, the sense strand harbors a nucleotide sequence including at least 17 contiguous nucleotides, with 0 or 1 mismatches, of a portion of the nucleotide sequence of SEQ ID NO: 1, and the antisense strand harbors a nucleotide sequence including at least 17 contiguous nucleotides, with 0 or 1 mismatches, of the corresponding portion of the nucleotide sequence of SEQ ID NO: 2, such that the sense strand is complementary to the at least 17 contiguous nucleotides in the antisense strand.

[0017] In some embodiments, the sense strand harbors a nucleotide sequence including at least 19 contiguous nucleotides, with 0 or 1 mismatches, of a portion of the nucleotide sequence of SEQ ID NO: 1, and the antisense strand harbors a nucleotide sequence including at least 19 contiguous nucleotides, with 0 or 1 mismatches, of the corresponding portion of the nucleotide sequence of SEQ ID NO: 2, such that the sense strand is complementary to the at least 19 contiguous nucleotides in the antisense strand.

[0018] In embodiments, the sense strand harbors a nucleotide sequence including at least 21 contiguous nucleotides, with 0 or 1 mismatches, of a portion of the nucleotide sequence of SEQ ID NO: 1, and the antisense strand harbors a nucleotide sequence including at least 21 contiguous nucleotides, with 0 or 1 mismatches, of the corresponding portion of the nucleotide sequence of SEQ ID NO: 2, such that the sense strand is complementary to the at least 21 contiguous nucleotides in the antisense strand.

[0019] In certain embodiments, the antisense strand includes a region of complementarity which includes at least 15 contiguous nucleotides of any one of the antisense sequences listed in any one of Tables 2, 3, 5, 6, 9 or 10. In certain embodiments, the antisense strand includes a region of complementarity which includes at least 19 contiguous nucleotides differing by no more than 3 nucleotides (i.e., differing by 3, 2, 1, or 0 nucleotides) from any one of the antisense sequences listed in any one of Tables 2, 3, 5, 6, 9 or 10. In certain embodiments, the antisense strand includes a region of complementarity which includes at least 19 contiguous nucleotides of any one of the antisense sequences listed in any one of Tables 2, 3, 5, 6, 9 or 10. In certain embodiments, thymine-to-uracil or uracil-to-thymine differences between aligned (compared) sequences are not counted as nucleotides that differ between the aligned (compared) sequences.

[0020] In some embodiments, the agents include one or more lipophilic moieties conjugated to one or more nucleotide positions (optionally internal nucleotide positions), optionally via a linker or carrier. In certain embodiments, the lipophilic moiety is conjugated to one or more positions in the double stranded region of the dsRNA agent. Optionally, the one or more lipophilic moieties are conjugated to at least the sense strand. In certain embodiments, the one or more lipophilic moieties are conjugated to at least the antisense strand. In embodiments, the one or more lipophilic moieties are conjugated to both strands.

[0021] In embodiments, lipophilicity of the lipophilic moiety, measured by logKow, exceeds 0.

[0022] In some embodiments, the hydrophobicity of the double-stranded RNAi agent, measured by the unbound fraction in a plasma protein binding assay of the double-stranded RNAi agent, exceeds 0.2. Optionally, the plasma protein binding assay is an electrophoretic mobility shift assay using human serum albumin protein.

[0023] Another aspect of the instant disclosure provides a double stranded RNAi agent for inhibiting expression of an ATXN2 gene, where the dsRNA agent includes a sense strand and an antisense strand, where the sense strand includes at least 15 contiguous nucleotides differing by no more than 3 nucleotides (i.e., differing by 3, 2, 1, or 0 nucleotides) from any one of the sense strand sequences presented in Tables 2, 3, 5, 6, 9 or 10; and where the antisense strand includes at least 15 contiguous nucleotides differing by no more than 3 nucleotides from any one of antisense strand nucleotide sequences presented in Tables 2, 3, 5, 6, 9 or 10. In certain embodiments, the sense strand includes at least 15 contiguous nucleotides of any one of the sense strand sequences presented in Tables 2, 3, 5, 6, 9 or 10; and where the antisense strand includes at least 15 contiguous nucleotides of any one of antisense strand nucleotide sequences presented in Tables 2, 3, 5, 6, 9 or 10. In certain embodiments, the sense strand includes at least 19 contiguous nucleotides of any one of the sense strand sequences presented in Tables 2, 3, 5, 6, 9 or 10; and where the antisense strand includes at least 19 contiguous nucleotides of any one of antisense strand nucleotide sequences presented in Tables 2, 3, 5, 6, 9 or 10 (i.e., differing by 3, 2, 1, or 0 nucleotides) from any one of antisense strand nucleotide sequences presented in Tables 2, 3, 5, 6, 9 or 10.

[0024] An additional aspect of the disclosure provides a double stranded RNAi agent for inhibiting expression of an ATXN2 gene, where the dsRNA agent includes a sense strand and an antisense strand, where the sense strand includes at least 15 contiguous nucleotides differing by no more than 3 nucleotides (i.e., differing by 3, 2, 1, or 0 nucleotides) from any one of the nucleotide sequences of SEQ ID NOs: 1, 3, 5, or 7, or a nucleotide sequence having at least 90% nucleotide sequence identity, e.g. 90, 91, 92, 93, 94, 95, 96, 97, 98, 99 or 100% identity, to the entire nucleotide sequence of any one of SEQ ID NOs: 1, 3, 5, or 7, where a substitution of a uracil for any thymine of SEQ ID NOs: 1, 3, 5, or 7 (when comparing aligned sequences) does not count as a difference that contributes to the differing by no more than 3 nucleotides (i.e., differing by 3, 2, 1, or 0 nucleotides) from any one of the nucleotide sequences of SEQ ID NOs: 1, 3, 5, or 7, or the nucleotide sequence having at least 90% nucleotide sequence identity, e.g. 90, 91, 92, 93, 94, 95, 96, 97, 98, 99 or 100% identity, to the entire nucleotide sequence of any one of SEQ ID NOs: 1, 3, 5, or 7; and where the antisense strand includes at least 15 contiguous nucleotides differing by no more than 3 nucleotides from any one of the nucleotide sequences of SEQ ID NOs: 2, 4, 6, or 8, or a nucleotide sequence having at least 90% nucleotide sequence identity, e.g. 90, 91, 92, 93, 94, 95, 96, 97, 98, 99 or 100% identity, to the entire nucleotide sequence of any one of SEQ ID NOs: 2, 4, 6, or 8, where a substitution of a uracil for any thymine of SEQ ID NOs: 2, 4, 6, or 8 (when comparing aligned sequences) does not count as a difference that contributes to the differing by no more than 3 nucleotides from any one of the nucleotide sequences of SEQ ID NOs: 2, 4, 6, or 8, or the nucleotide sequence having at least 90% nucleotide sequence identity, e.g. 90, 91, 92, 93, 94, 95, 96, 97, 98, 99 or 100% identity, to the entire nucleotide sequence of any one of SEQ ID NOs: 2, 4, 6, or 8, where at least one of the sense strand and the antisense strand includes one or more lipophilic moieties conjugated to one or more internal nucleotide positions, optionally via a linker or carrier.

[0025] In one embodiment, the double stranded RNAi agent targeted to ATXN2 comprises a sense strand which includes at least 15 contiguous nucleotides differing by no more than 3 nucleotides (i.e., differing by 3, 2, 1, or 0 nucleotides) from the nucleotide sequence of the sense strand nucleotide sequence of a duplex in Tables 2, 3, 5, 6, 9 or 10.

[0026] In one embodiment, the double stranded RNAi agent targeted to ATXN2 comprises an antisense strand which includes at least 15 contiguous nucleotides differing by no more than 3 nucleotides (i.e., differing by 3, 2, 1, or 0 nucleotides) from the antisense nucleotide sequence of duplex in one of Tables 2, 3, 5, 6, 9 or 10.

[0027] Optionally, the double stranded RNAi agent includes at least one modified nucleotide. In embodiments, no more than five of the sense strand nucleotides and no more than five of the nucleotides of the antisense strand are unmodified nucleotides.

[0028] In certain embodiments, substantially all of the nucleotides of the sense strand are modified nucleotides. Optionally, all of the nucleotides of the sense strand are modified nucleotides.

[0029] In some embodiments, substantially all of the nucleotides of the antisense strand are modified nucleotides. Optionally, all of the nucleotides of the antisense strand are modified nucleotides.

[0030] Optionally, all of the nucleotides of the sense strand and all of the nucleotides of the antisense strand are modified nucleotides.

[0031] In one embodiment, at least one of the modified nucleotides is a deoxy-nucleotide, a 3′-terminal deoxy-thymine (dT) nucleotide, a 2′-O-methyl modified nucleotide, a 2′-fluoro modified nucleotide, a 2′-deoxy-modified nucleotide, a locked nucleotide, an unlocked nucleotide, a conformationally restricted nucleotide, a constrained ethyl nucleotide, an abasic nucleotide, a 2′-amino-modified nucleotide, a 2′-O-allyl-modified nucleotide, 2′-C-alkyl-modified nucleotide, 2′-hydroxly-modified nucleotide, a 2′-methoxyethyl modified nucleotide, a 2′-O-alkyl-modified nucleotide, a morpholino nucleotide, a phosphoramidate, a non-natural base comprising nucleotide, a tetrahydropyran modified nucleotide, a 1,5-anhydrohexitol modified nucleotide, a cyclohexenyl modified nucleotide, a nucleotide comprising a 5′-phosphorothioate group, a nucleotide comprising a 5′-methylphosphonate group, a nucleotide comprising a 5′ phosphate or 5′ phosphate mimic, a nucleotide comprising vinyl phosphonate, a nucleotide comprising adenosine-glycol nucleic acid (GNA), a nucleotide comprising thymidine-glycol nucleic acid (GNA)S-Isomer, a nucleotide comprising 2-hydroxymethyl-tetrahydrofurane-5-phosphate, a nucleotide comprising 2′-deoxythymidine-3′phosphate, a nucleotide comprising 2′-deoxyguanosine-3′-phosphate, or a terminal nucleotide linked to a cholesteryl derivative or a dodecanoic acid bisdecylamide group.

[0032] In a related embodiment, the modified nucleotide is a 2′-deoxy-2′-fluoro modified nucleotide, a 2′-deoxy-modified nucleotide, 3′-terminal deoxy-thymine nucleotides (dT), a locked nucleotide, an abasic nucleotide, a 2′-amino-modified nucleotide, a 2′-alkyl-modified nucleotide, a morpholino nucleotide, a phosphoramidate, or a non-natural base comprising nucleotide.

[0033] In one embodiment, the modified nucleotide includes a short sequence of 3′-terminal deoxy-thymine nucleotides (dT).

[0034] In another embodiment, the modifications on the nucleotides are 2′-O-methyl, 2′fluoro and GNA modifications.

[0035] In an additional embodiment, the double stranded RNAi agent includes at least one phosphorothioate internucleotide linkage. Optionally, the double stranded RNAi agent includes 6-8 (e.g., 6, 7, or 8) phosphorothioate internucleotide linkages.

[0036] In certain embodiments, the region of complementarity is at least 17 nucleotides in length. Optionally, the region of complementarity is 19-23 nucleotides in length. Optionally, the region of complementarity is 19 nucleotides in length.

[0037] In one embodiment, each strand is no more than 30 nucleotides in length.

[0038] In another embodiment, at least one strand includes a 3′ overhang of at least 1 nucleotide.

[0039] Optionally, at least one strand includes a 3′ overhang of at least 2 nucleotides.

[0040] In embodiments, the double stranded region is 15-30 nucleotide pairs in length.

[0041] Optionally, the double stranded region is 17-23 nucleotide pairs in length.

[0042] In some embodiments, the double stranded region is 17-25 nucleotide pairs in length.

[0043] In certain embodiments, the double stranded region is 23-27 nucleotide pairs in length.

[0044] In embodiments, the double stranded region is 19-21 nucleotide pairs in length.

[0045] In another embodiment, the double stranded region is 21-23 nucleotide pairs in length.

[0046] In embodiments, each strand has 19-30 nucleotides. Optionally, each strand has 19-23 nucleotides. In certain embodiments, each strand has 21-23 nucleotides.

[0047] In some embodiments, the double stranded RNAi agent further includes a lipophilic ligand, e.g., a C16 ligand, conjugated to the 3′ end of the sense strand through a monovalent or branched bivalent or trivalent linker.

[0048] In one embodiment, the ligand is

[chemical structure]

where B is a nucleotide base or a nucleotide base analog, optionally where B is adenine, guanine, cytosine, thymine or uracil.

[0049] In other embodiments, the agent further comprises a targeting ligand that targets a liver tissue, e.g., one or more GalNAc derivatives, optionally conjugated to the double stranded RNAi agent via a linker or carrier.

[0050] In yet other embodiments, the agents further comprise a lipophilic ligand, e.g., a C16 ligand, conjugated to the 3′ end of the sense strand through a monovalent or branched bivalent or trivalent linker and a targeting ligand that targets a liver tissue, e.g., one or more GalNAc derivatives conjugated to the 3′ end of the sense strand through a monovalent or branched bivalent or trivalent linker.

[0051] In another embodiment, the region of complementarity to ATXN2 includes any one of the antisense sequences in any one of Tables 2, 3, 5, 6, 9 or 10.

[0052] In an additional embodiment, the region of complementarity to ATXN2 is that of any one of the antisense sequences in any one of Tables 2, 3, 5, 6, 9 or 10. In some embodiments, the internal nucleotide positions include all positions except the terminal two positions from each end of the strand.

[0053] In a related embodiment, the internal positions include all positions except terminal three positions from each end of the strand. Optionally, the internal positions exclude the cleavage site region of the sense strand.

[0054] In some embodiments, the internal positions exclude positions 9-12, counting from the 5′-end of the sense strand. In certain embodiments, the sense strand is 21 nucleotides in length.

[0055] In other embodiments, the internal positions exclude positions 11-13, counting from the 3′-end of the sense strand. Optionally, the internal positions exclude the cleavage site region of the antisense strand. In certain embodiments, the sense strand is 21 nucleotides in length.

[0056] In some embodiments, the internal positions exclude positions 12-14, counting from the 5′-end of the antisense strand. In certain embodiments, the antisense strand is 23 nucleotides in length.

[0057] In another embodiment, the internal positions excluding positions 11-13 on the sense strand, counting from the 3′-end, and positions 12-14 on the antisense strand, counting from the 5′-end. In certain embodiments, the sense strand is 21 nucleotides in length and the antisense strand is 23 nucleotides in length.

[0058] In an additional embodiment, one or more lipophilic moieties are conjugated to one or more of the following internal positions: positions 4-8 and 13-18 on the sense strand, and positions 6-10 and 15-18 on the antisense strand, counting from the 5′end of each strand. Optionally, one or more lipophilic moieties are conjugated to one or more of the following internal positions: positions 5, 6, 7, 15, and 17 on the sense strand, and positions 15 and 17 on the antisense strand, counting from the 5′-end of each strand. In certain embodiments, the sense strand is 21 nucleotides in length and the antisense strand is 23 nucleotides in length.

[0059] Optionally, the lipophilic moiety is conjugated to position 21, position 20, position 15, position 1, position 7, position 6, or position 2 of the sense strand or position 16 of the antisense strand.

[0060] In certain embodiments, the lipophilic moiety is conjugated to position 21, position 20, position 15, position 1, or position 7 of the sense strand.

[0061] In embodiments, the lipophilic moiety is conjugated to position 21, position 20, or position 15 of the sense strand.

[0062] In some embodiments, the lipophilic moiety is conjugated to position 20 or position 15 of the sense strand.

[0063] In embodiments, the lipophilic moiety is conjugated to position 16 of the antisense strand.

[0064] In certain embodiments, the lipophilic moiety is an aliphatic, alicyclic, or polyalicyclic compound. Optionally, the lipophilic moiety is lipid, cholesterol, retinoic acid, cholic acid, adamantane acetic acid, 1-pyrene butyric acid, dihydrotestosterone, 1,3-bis-O(hexadecyl)glycerol, geranyloxyhexyanol, hexadecylglycerol, borneol, menthol, 1,3-propanediol, heptadecyl group, palmitic acid, myristic acid, 03-(oleoyl)lithocholic acid, 03-(oleoyl)cholenic acid, dimethoxytrityl, or phenoxazine.

[0065] In some embodiments, the lipophilic moiety contains a saturated or unsaturated C4-C30 hydrocarbon chain, and an optional functional group selected that is hydroxyl, amine, carboxylic acid, sulfonate, phosphate, thiol, azide, or alkyne.

[0066] In certain embodiments, the lipophilic moiety contains a saturated or unsaturated C6-Cis hydrocarbon chain. Optionally, the lipophilic moiety contains a saturated or unsaturated C16 hydrocarbon chain. In a related embodiment, the lipophilic moiety is conjugated via a carrier that replaces one or more nucleotide(s) in the internal position(s). In certain embodiments, the carrier is a cyclic group that is pyrrolidinyl, pyrazolinyl, pyrazolidinyl, imidazolinyl, imidazolidinyl, piperidinyl, piperazinyl, [1,3]dioxolanyl, oxazolidinyl, isoxazolidinyl, morpholinyl, thiazolidinyl, isothiazolidinyl, quinoxalinyl, pyridazinonyl, tetrahydrofuranyl, or decalinyl; or is an acyclic moiety based on a serinol backbone or a diethanolamine backbone.

[0067] In embodiments, the saturated or unsaturated C16 hydrocarbon chain is conjugated to position 6, counting from the 5′-end of the strand.

[0068] In some embodiments, the lipophilic moiety is conjugated to the double-stranded RNAi agent via a linker containing an ether, thioether, urea, carbonate, amine, amide, maleimide-thioether, disulfide, phosphodiester, sulfonamide linkage, a product of a click reaction, or carbamate.

[0069] In one embodiment, the lipophilic moiety is conjugated to a nucleobase, sugar moiety, or internucleosidic linkage.

[0070] In another embodiment, the double-stranded RNAi agent further includes a phosphate or phosphate mimic at the 5′-end of the antisense strand. Optionally, the phosphate mimic is a 5′-vinyl phosphonate (VP).

[0071] In certain embodiments, the double-stranded RNAi agent further includes a targeting ligand that targets a receptor which mediates delivery to a CNS tissue, e.g., a hydrophilic ligand. In certain embodiments, the targeting ligand is a C16 ligand.

[0072] In some embodiments, the double-stranded RNAi agent further includes a targeting ligand that targets a brain tissue, e.g., striatum.

[0073] In some embodiments, the double-stranded RNAi agent further includes a targeting ligand that targets a liver tissue, e.g., hepatocytes.

[0074] In one embodiment, the lipophilic moiety or targeting ligand is conjugated via a bio-cleavable linker that is DNA, RNA, disulfide, amide, functionalized monosaccharides or oligosaccharides of galactosamine, glucosamine, glucose, galactose, mannose, or a combination thereof.

[0075] In a related embodiment, the 3′ end of the sense strand is protected via an end cap which is a cyclic group having an amine, the cyclic group being pyrrolidinyl, pyrazolinyl, pyrazolidinyl, imidazolinyl, imidazolidinyl, piperidinyl, piperazinyl, [1,3]dioxolanyl, oxazolidinyl, isoxazolidinyl, morpholinyl, thiazolidinyl, isothiazolidinyl, quinoxalinyl, pyridazinonyl, tetrahydrofuranyl, or decalinyl.

[0076] In one embodiment, the RNAi agent includes at least one modified nucleotide that is a 2′-O-methyl modified nucleotide, a 2′-fluoro modified nucleotide, a nucleotide that includes a glycol nucleic acid (GNA) or a nucleotide that includes a vinyl phosphonate. Optionally, the RNAi agent includes at least one of each of the following modifications: 2′-O-methyl modified nucleotide, a 2′-fluoro modified nucleotide, a nucleotide comprising a glycol nucleic acid (GNA) and a nucleotide comprising vinyl phosphonate.

[0077] In another embodiment, the RNAi agent includes a pattern of modified nucleotides as provided below in Tables 2, 3, 5, 6, 9 or 10, optionally where locations of 2′-C16, 2′-O-methyl, GNA, phosphorothioate and 2′-fluoro modifications are irrespective of the individual nucleotide base sequences of the displayed RNAi agents.

[0078] In embodiments, the dsRNA agent further includes: a terminal, chiral modification occurring at the first internucleotide linkage at the 3′ end of the antisense strand, having the linkage phosphorus atom in Sp configuration; a terminal, chiral modification occurring at the first internucleotide linkage at the 5′ end of the antisense strand, having the linkage phosphorus atom in Rp configuration; or a terminal, chiral modification occurring at the first internucleotide linkage at the 5′ end of the sense strand, having the linkage phosphorus atom in either Rp configuration or Sp configuration.

[0079] In some embodiments, the dsRNA agent further includes: a terminal, chiral modification occurring at the first and second internucleotide linkages at the 3′ end of the antisense strand, having the linkage phosphorus atom in Sp configuration; a terminal, chiral modification occurring at the first internucleotide linkage at the 5′ end of the antisense strand, having the linkage phosphorus atom in Rp configuration; or a terminal, chiral modification occurring at the first internucleotide linkage at the 5′ end of the sense strand, having the linkage phosphorus atom in either Rp or Sp configuration.

[0080] In certain embodiments, the dsRNA agent further includes: a terminal, chiral modification occurring at the first, second and third internucleotide linkages at the 3′ end of the antisense strand, having the linkage phosphorus atom in Sp configuration; a terminal, chiral modification occurring at the first internucleotide linkage at the 5′ end of the antisense strand, having the linkage phosphorus atom in Rp configuration; or a terminal, chiral modification occurring at the first internucleotide linkage at the 5′ end of the sense strand, having the linkage phosphorus atom in either Rp or Sp configuration.

[0081] In embodiments, the dsRNA agent further includes: a terminal, chiral modification occurring at the first, and second internucleotide linkages at the 3′ end of the antisense strand, having the linkage phosphorus atom in Sp configuration; a terminal, chiral modification occurring at the third internucleotide linkages at the 3′ end of the antisense strand, having the linkage phosphorus atom in Rp configuration; a terminal, chiral modification occurring at the first internucleotide linkage at the 5′ end of the antisense strand, having the linkage phosphorus atom in Rp configuration; or a terminal, chiral modification occurring at the first internucleotide linkage at the 5′ end of the sense strand, having the linkage phosphorus atom in either Rp or Sp configuration.

[0082] In some embodiments, the dsRNA agent further includes: a terminal, chiral modification occurring at the first, and second internucleotide linkages at the 3′ end of the antisense strand, having the linkage phosphorus atom in Sp configuration; a terminal, chiral modification occurring at the first, and second internucleotide linkages at the 5′ end of the antisense strand, having the linkage phosphorus atom in Rp configuration; or a terminal, chiral modification occurring at the first internucleotide linkage at the 5′ end of the sense strand, having the linkage phosphorus atom in either Rp or Sp configuration.

[0083] An additional aspect of the instant disclosure provides a cell harboring a dsRNA agent of the instant disclosure.

[0084] One aspect of the instant disclosure provides a pharmaceutical composition for inhibiting expression of a gene encoding ATXN2 that includes a dsRNA agent of the instant disclosure.

[0085] An additional aspect of the disclosure provides a method of inhibiting expression of an ATXN2 gene in a cell, the method involving: (a) contacting the cell with a double stranded RNAi agent of the instant disclosure or a pharmaceutical composition of the instant disclosure; and (b) maintaining the cell produced in step (a) for a time sufficient to obtain degradation of the mRNA transcript of an ATXN2 gene, thereby inhibiting expression of the ATXN2 gene in the cell.

[0086] In one embodiment, the cell is within a subject. Optionally, the subject is a human.

[0087] In certain embodiments, the subject is a rhesus monkey, a cynomolgous monkey, a mouse, or a rat.

[0088] In embodiments, the expression of ATXN2 is inhibited by at least 50%.

[0089] In certain embodiments, the subject meets at least one diagnostic criterion for an ATXN2-associated disease.

[0090] In certain embodiments, the human subject has been diagnosed with or suffers from an ATXN2-associated neurodegenerative disease, e.g., a spinocerebellar ataxia (SCA), such as spinocerebellar ataxia 2 (SCA2), and Amyotrophic Lateral Sclerosis (ALS).

[0091] In certain embodiments, the method further involves administering an additional therapeutic agent or therapy to the subject. Exemplary additional therapeutics and treatments include, for example, sedatives, antidepressants, clonazepam, sodium valproate, opiates, antiepileptic drugs, cholinesterase inhibitors, memantine, benzodiazepines, levodopa, COMT inhibitors (e.g., tolcapone and entacapone), dopamine agonists (e.g., bromocriptine, pergolide, pramipexole, ropinirole, piribedil, cabergoline, apomorphine and lisuride), MAO-B inhibitors (e.g., safinamide, selegiline and rasagiline), amantadine, an anticholinergic, modafinil, pimavanserin, doxepin, rasagline, an antipsychotic, an atypical antipsychotic (e.g., amisulpride, olanzapine, risperidone, and clozapine), riluzole, edaravone, deep brain stimulation, non-invasive ventilation (NIV), invasive ventilation physical therapy, occupational therapy, speech therapy, dietary changes and swallowing technique a feeding tube, a PEG tube, probiotics, and psychological therapy.

[0092] In certain embodiments, the double stranded RNAi agent is administered at a dose of about 0.01 mg/kg to about 50 mg/kg.

[0093] In some embodiments, the double stranded RNAi agent is administered to the subject intrathecally.

[0094] In one embodiment, the method reduces the expression of an ATXN2 gene in a brain (e.g., striatum) or spine tissue. Optionally, the brain or spine tissue is striatum, cortex, cerebellum, cervical spine, lumbar spine, or thoracic spine.

[0095] In some embodiments, the double stranded RNAi agent is administered to the subject subcutaneously.

[0096] In one embodiment, the method reduces the expression of an ATXN2 gene in the liver.

[0097] In other embodiments, the method reduces the expression of an ATXN2 gene in the liver and the brain.

[0098] Another aspect of the instant disclosure provides a method of treating a subject diagnosed with an ATXN2-associated neurodegenerative disease, the method involving administering to the subject a therapeutically effective amount of a dsRNA agent or a pharmaceutical composition of the instant disclosure, thereby treating the subject.

[0099] In one embodiment, treating involves amelioration of at least on sign or symptom of the disease.

[0100] In certain embodiments, treating includes prevention of progression of the disease.

[0101] In embodiments, the ATXN2-associated disease is characterized by progressive cerebellar ataxia or blindness. In certain embodiments, the ATXN2-associated disease is a spinocerebellar ataxia (SCA), such as spinocerebellar ataxia 2 (SCA2), or Amyotrophic Lateral Sclerosis (ALS).

[0102] An additional aspect of the disclosure provides a method of preventing development of an ATXN2-associated neurodegenerative disease in a subject meeting at least one diagnostic criterion for an ATXN2-associated neurodegenerative disease, the method involving administering to the subject a therapeutically effective amount of a dsRNA agent or pharmaceutical composition of the disclosure, thereby preventing the development of an ATXN2-associated neurodegenerative disease in the subject meeting at least one diagnostic criterion for an ATXN2-associated neurodegenerative disease.

[0103] In certain embodiments, the method further involves administering to the subject an additional agent or a therapy suitable for treatment or prevention of an ATXN2-associated disease or disorder.

[0104] Another aspect of the instant disclosure provides a method of inhibiting the expression of ATXN2 in a subject, the method involving: administering to the subject a therapeutically effective amount of a double stranded RNAi agent of the disclosure or a pharmaceutical composition of the disclosure, thereby inhibiting the expression of ATXN2 in the subject.

[0105] An additional aspect of the disclosure provides a method for treating or preventing a disorder or ATXN2-associated neurodegenerative disease or disorder in a subject, the method involving administering to the subject a therapeutically effective amount of a double stranded RNAi agent of the disclosure or a pharmaceutical composition of the disclosure, thereby treating or preventing an ATXN2-associated neurodegenerative disease or disorder in the subject.

[0106] Another aspect of the instant disclosure provides a double stranded RNAi agent for inhibiting expression of an ATXN2 gene, where the double stranded RNAi agent includes a sense strand complementary to an antisense strand, where the antisense strand includes a region complementary to part of an mRNA encoding ATXN2, where each strand is about 14 to about 30 nucleotides in length, where the double stranded RNAi agent is represented by formula (III):

sense:
5′ nₚ-Nₐ-(X X X)ᵢ-N_{b}-Y Y Y-N_{b}-(Z Z Z)ⱼ-Nₐ-n_{q} 3′
antisense:
3′ nₚ′-Nₐ′-(X′X′X′)ₖ-N_{b}′-Y′Y′Y′-N_{b}′-(Z′Z′Z′)ₗ-
Nₐ′-n_{q}′ 5′ (III)

[0107] where:
[0108] i, j, k, and 1 are each independently 0 or 1;
[0109] p, p′, q, and q′ are each independently 0-6;
[0110] each Nₐ and Nₐ′ independently represents an oligonucleotide sequence including 0-25 nucleotides which are either modified or unmodified or combinations thereof, each sequence including at least two differently modified nucleotides;
[0111] each N_{b} and N_{b}′ independently represents an oligonucleotide sequence including 0-10 nucleotides which are either modified or unmodified or combinations thereof, each nₚ, nₚ′, n_{q}, and n_{q}′, each of which may or may not be present, independently represents an overhang nucleotide;
[0112] XXX, YYY, ZZZ, X′X′X′, Y′Y′Y′, and Z′Z′Z′ each independently represent one motif of three identical modifications on three consecutive nucleotides;
   modifications on N_{b} differ from the modification on Y and modifications on N_{b}′ differ from the modification on Y′; and
[0113] where the sense strand is conjugated to at least one ligand.

[0114] In one embodiment, i is 0; j is 0; i is 1; j is 1; both i and j are 0; or both i and j are 1.

[0115] In another embodiment, k is 0; 1 is 0; k is 1; 1 is 1; both k and 1 are 0; or both k and 1 are 1.

[0116] In certain embodiments, XXX is complementary to X′X′X′, YYY is complementary to Y′Y′Y′, and ZZZ is complementary to Z′Z′Z′.

[0117] In another embodiment, the YYY motif occurs at or near the cleavage site of the sense strand.

[0118] In an additional embodiment, the Y′Y′Y′ motif occurs at the 11, 12 and 13 positions of the antisense strand from the 5′-end. Optionally, the Y′ is 2′-O-methyl.

[0119] In some embodiments, formula (III) is represented by formula (IIIa):

sense:
5′ nₚ-Nₐ-Y Y Y-Nₐ-n_{q} 3′
antisense:
3′ nₚ′-Nₐ′-Y′Y′Y′-Nₐ′-n_{q}′ 5′ (IIIa).

[0120] In another embodiment, formula (III) is represented by formula (IIIb):

sense:
5′ nₚ-Nₐ-Y Y Y-N_{b}-Z Z Z-Nₐ-n_{q} 3′
antisense:
3′ nₚ′-Nₐ′-Y′Y′Y′-N_{b}′-Z′Z′Z′-Nₐ′-n_{q}′ 5′ (IIIb)

[0121] where each N_{b} and N_{b}′ independently represents an oligonucleotide sequence including 1-5 modified nucleotides.

[0122] In an additional embodiment, formula (III) is represented by formula (IIIc):

sense:
5′ nₚ-Nₐ-X X X-N_{b}-Y Y Y-Nₐ-n_{q} 3′
antisense:
3′ nₚ′-Nₐ′-X′X′X′-N_{b}′-Y'Y'Y'-Nₐ′-n_{q}′ 5′ (IIIc)

[0123] where each N_{b} and N_{b}′ independently represents an oligonucleotide sequence including 1-5 modified nucleotides.

[0124] In certain embodiments, formula (III) is represented by formula (IIId):

(IIId)
sense:
5′ nₚ-Nₐ-X X X-N_{b}-Y Y Y-N_{b}-ZZZ-Nₐ-n_{q} 3′
antisense:
3′ nₚ′-Nₐ′-X′X′X′-N_{b′}-Y′Y′Y′-N_{b′}-Z′Z′Z′-N_{a′}-n_{q′} 5′

[0125] where each N_{b} and N_{b}′ independently represents an oligonucleotide sequence including 1-5 modified nucleotides and each Nₐ and Nₐ′ independently represents an oligonucleotide sequence including 2-10 modified nucleotides.

[0126] In another embodiment, the double stranded region is 15-30 nucleotide pairs in length. Optionally, the double stranded region is 17-23 nucleotide pairs in length.

[0127] In certain embodiments, the double stranded region is 17-25 nucleotide pairs in length. Optionally, the double stranded region is 23-27 nucleotide pairs in length.

[0128] In some embodiments, the double stranded region is 19-21 nucleotide pairs in length. Optionally, the double stranded region is 21-23 nucleotide pairs in length.

[0129] In certain embodiments, each strand has 15-30 nucleotides. Optionally, each strand has 19-30 nucleotides. Optionally, each strand has 19-23 nucleotides.

[0130] In certain embodiments, the double stranded region is 19-21 nucleotide pairs in length and each strand has 19-23 nucleotides.

[0131] In another embodiment, the modifications on the nucleotides of the RNAi agent are LNA, glycol nucleic acid (GNA), HNA, CeNA, 2′-methoxyethyl, 2′-O-alkyl, 2′-O-allyl, 2′-C— allyl, 2′-fluoro, 2′-deoxy or 2′-hydroxyl, and combinations thereof. Optionally, the modifications on nucleotides include 2′-O-methyl, 2′-fluoro or GNA, and combinations thereof. In a related embodiment, the modifications on the nucleotides are 2′-O-methyl or 2′-fluoro modifications.

[0132] In one embodiment the RNAi agent includes a ligand that is or includes one or more lipophilic, e.g., C16, moieties attached through a bivalent or trivalent branched linker.

[0133] In other embodiments, the agent further comprises a targeting ligand that targets a liver tissue, e.g., one or more GalNAc derivatives.

[0134] In yet other embodiments, the agents further comprise a lipophilic ligand, e.g., a C16 ligand, conjugated to the 3′ end of the sense strand through a monovalent or branched bivalent or trivalent linker and a targeting ligand that targets a liver tissue, e.g., one or more GalNAc derivatives conjugated to the 3′ end of the sense strand through a monovalent or branched bivalent or trivalent linker.

[0135] In certain embodiments, the ligand is attached to the 3′ end of the sense strand.

[0136] In some embodiments, the RNAi agent further includes at least one phosphorothioate or methylphosphonate internucleotide linkage. In a related embodiment, the phosphorothioate or methylphosphonate internucleotide linkage is at the 3′-terminus of one strand. Optionally, the strand is the antisense strand. In another embodiment, the strand is the sense strand. In a related embodiment, the phosphorothioate or methylphosphonate internucleotide linkage is at the 5′-terminus of one strand. Optionally, the strand is the antisense strand. In another embodiment, the strand is the sense strand.

[0137] In another embodiment, the phosphorothioate or methylphosphonate internucleotide linkage is at the both the 5′- and 3′-terminus of one strand. Optionally, the strand is the antisense strand. In another embodiment, the strand is the sense strand.

[0138] In an additional embodiment, the base pair at the 1 position of the 5′-end of the antisense strand of the RNAi agent duplex is an A:U base pair.

[0139] In certain embodiments, the Y nucleotides contain a 2′-fluoro modification.

[0140] In some embodiments, the Y′ nucleotides contain a 2′-O-methyl modification.

[0141] In certain embodiments, p′>0. Optionally, p′=2.

[0142] In some embodiments, q′=0, p=0, q=0, and p′ overhang nucleotides are complementary to the target mRNA.

[0143] In certain embodiments, q′=0, p=0, q=0, and p′ overhang nucleotides are non-complementary to the target mRNA.

[0144] In one embodiment, the sense strand of the RNAi agent has a total of 21 nucleotides and the antisense strand has a total of 23 nucleotides.

[0145] In another embodiment, at least one nₚ′ is linked to a neighboring nucleotide via a phosphorothioate linkage. Optionally, all nₚ′ are linked to neighboring nucleotides via phosphorothioate linkages.

[0146] In certain embodiments, the ATXN2 RNAi agent of the instant disclosure is one of those listed in Tables 2, 3, 5, 6, 9 or 10. In some embodiments, all of the nucleotides of the sense strand and all of the nucleotides of the antisense strand include a modification.

[0147] Another aspect of the instant disclosure provides a double stranded RNAi agent for inhibiting expression of an ATXN2 gene in a cell, where the double stranded RNAi agent includes a sense strand complementary to an antisense strand, where the antisense strand includes a region complementary to part of an mRNA encoding an ATXN2 gene, where each strand is about 14 to about 30 nucleotides in length, where the double stranded RNAi agent is represented by formula (III):

(III)
sense:
5′ nₚ-Nₐ-(X X X)ᵢ-N_{b}-Y Y Y-N_{b}-(Z Z Z)ⱼ-Nₐ-n_{q} 3′
antisense:
3′ nₚ′-Nₐ′-(X′X′X′)ₖ-N_{b}′-Y′Y′Y′-N_{b}′-(Z′Z′Z′)ₗ-Nₐ′-
n_{q}′ 5′

[0148] where:
[0149] i, j, k, and 1 are each independently 0 or 1;
[0150] p, p′, q, and q′ are each independently 0-6;
[0151] each Nₐ and Nₐ′ independently represents an oligonucleotide sequence including 0-25 nucleotides which are either modified or unmodified or combinations thereof, each sequence including at least two differently modified nucleotides;
[0152] each N_{b} and N_{b}′ independently represents an oligonucleotide sequence including 0-10 nucleotides which are either modified or unmodified or combinations thereof, each nₚ, nₚ′, n_{q}, and n_{q}′, each of which may or may not be present independently represents an overhang nucleotide;
[0153] XXX, YYY, ZZZ, X′X′X′, Y′Y′Y′, and Z′Z′Z′ each independently represent one motif of three identical modifications on three consecutive nucleotides, and where the modifications are 2′-O-methyl or 2′-fluoro modifications;
[0154] modifications on N_{b} differ from the modification on Y and modifications on N_{b}′ differ from the modification on Y′; and
[0155] where the sense strand is conjugated to at least one ligand, optionally where the ligand is one or more lipophilic, e.g., C16, ligands, or one or more GalNAc derivatives.

[0156] An additional aspect of the instant disclosure provides a double stranded RNAi agent for inhibiting expression of an ATXN2 gene in a cell, where the double stranded RNAi agent includes a sense strand complementary to an antisense strand, where the antisense strand includes a region complementary to part of an mRNA encoding ATXN2, where each strand is about 14 to about 30 nucleotides in length, where the double stranded RNAi agent is represented by formula (III):

(III)
sense:
5′ nₚ-Nₐ-(X X X)ᵢ-N_{b}-Y Y Y-N_{b}-(Z Z Z)ⱼ-Nₐ-n_{q} 3′
antisense:
3′ nₚ′-Nₐ′-(X′X′X′)ₖ-N_{b}′-Y′Y′Y′-N_{b}′-(Z′Z′Z′)ₗ-Nₐ′-
n_{q}′ 5′

[0157] where:
[0158] i, j, k, and 1 are each independently 0 or 1;
[0159] each nₚ, n_{q}, and n_{q}′, each of which may or may not be present, independently represents an overhang nucleotide;
[0160] p, q, and q′ are each independently 0-6;
[0161] nₚ′>0 and at least one nₚ′ is linked to a neighboring nucleotide via a phosphorothioate linkage;
[0162] each Nₐ and Nₐ′ independently represents an oligonucleotide sequence including 0-25 nucleotides which are either modified or unmodified or combinations thereof, each sequence including at least two differently modified nucleotides;
[0163] each N_{b} and N_{b}′ independently represents an oligonucleotide sequence including 0-10 nucleotides which are either modified or unmodified or combinations thereof, XXX, YYY, ZZZ, X′X′X′, Y′Y′Y′, and Z′Z′Z′ each independently represent one motif of three identical modifications on three consecutive nucleotides, and where the modifications are 2′-O-methyl, glycol nucleic acid (GNA) or 2′-fluoro modifications;
[0164] modifications on N_{b} differ from the modification on Y and modifications on N_{b}′ differ from the modification on Y′; and
[0165] where the sense strand is conjugated to at least one ligand, optionally where the ligand is one or more lipophilic, e.g., C16, ligands, or one or more GalNAc derivatives.

[0166] Another aspect of the instant disclosure provides a double stranded RNAi agent for inhibiting expression of an ATXN2 gene in a cell, where the double stranded RNAi agent includes a sense strand complementary to an antisense strand, where the antisense strand includes a region complementary to part of an mRNA encoding ATXN2 (SEQ ID NO: 1, or a nucleotide sequence having at least 90% nucleotide sequence identity, e.g. 90, 91, 92, 93, 94, 95, 96, 97, 98, 99 or 100% identity, to the entire nucleotide sequence of SEQ ID NO: 1), where each strand is about 14 to about 30 nucleotides in length, where the double stranded RNAi agent is represented by formula (III):

(III)
sense:
5′ nₚ-Nₐ-(X X X)ᵢ-N_{b}-Y Y Y-N_{b}-(Z Z Z)ⱼ-Nₐ-n_{q} 3′
antisense:
3′ nₚ′-Nₐ′-(X′X′X′)ₖ-N_{b}′-Y′Y′Y′-N_{b}′-(Z′Z′Z′)ₗ-Nₐ′-
n_{q}′ 5′

[0167] where:
[0168] i, j, k, and 1 are each independently 0 or 1;
[0169] each nₚ, n_{q}, and n_{q}′, each of which may or may not be present, independently represents an overhang nucleotide;
[0170] p, q, and q′ are each independently 0-6;
[0171] nₚ′>0 and at least one nₚ′ is linked to a neighboring nucleotide via a phosphorothioate linkage;
[0172] each Nₐ and Nₐ′ independently represents an oligonucleotide sequence including 0-25 nucleotides which are either modified or unmodified or combinations thereof, each sequence including at least two differently modified nucleotides;
[0173] each N_{b} and N_{b}′ independently represents an oligonucleotide sequence including 0-10 nucleotides which are either modified or unmodified or combinations thereof;
[0174] XXX, YYY, ZZZ, X′X′X′, Y′Y′Y′, and Z′Z′Z′ each independently represent one motif of three identical modifications on three consecutive nucleotides, and where the modifications are 2′-O-methyl or 2′-fluoro modifications;
[0175] modifications on N_{b} differ from the modification on Y and modifications on N_{b}′ differ from the modification on Y′; and
[0176] where the sense strand is conjugated to at least one ligand, optionally where the ligand is one or more lipophilic, e.g., C16, ligands, or one or more GalNAc derivatives.

[0177] An additional aspect of the instant disclosure provides a double stranded RNAi agent for inhibiting expression of an ATXN2 gene in a cell, where the double stranded RNAi agent includes a sense strand complementary to an antisense strand, where the antisense strand includes a region complementary to part of an mRNA encoding ATXN2 (SEQ ID NO: 1, or a nucleotide sequence having at least 90% nucleotide sequence identity, e.g. 90, 91, 92, 93, 94, 95, 96, 97, 98, 99 or 100% identity, to the entire nucleotide sequence of SEQ ID NO: 1), where each strand is about 14 to about 30 nucleotides in length, where the double stranded RNAi agent is represented by formula (III):

(III)
sense:
5′ nₚ-Nₐ-(X X X)ᵢ-N_{b}-Y Y Y-N_{b}-(Z Z Z)ⱼ-Nₐ-n_{q} 3′
antisense:
3′ nₚ′-Nₐ′-(X′X′X′)ₖ-N_{b}′-Y′Y′Y′-N_{b}′-(Z′Z′Z′)ₜ-Nₐ′-
n_{q}′ 5′

[0178] where:
[0179] i, j, k, and 1 are each independently 0 or 1;
[0180] each nₚ, n_{q}, and n_{q}′, each of which may or may not be present, independently represents an overhang nucleotide;
[0181] p, q, and q′ are each independently 0-6;
[0182] nₚ′>0 and at least one nₚ′ is linked to a neighboring nucleotide via a phosphorothioate linkage;
[0183] each Nₐ and Nₐ′ independently represents an oligonucleotide sequence including 0-25 nucleotides which are either modified or unmodified or combinations thereof, each sequence including at least two differently modified nucleotides;
[0184] each N_{b} and N_{b}′ independently represents an oligonucleotide sequence including 0-10 nucleotides which are either modified or unmodified or combinations thereof,
[0185] XXX, YYY, ZZZ, X′X′X′, Y′Y′Y′, and Z′Z′Z′ each independently represent one motif of three identical modifications on three consecutive nucleotides, and where the modifications are 2′-O-methyl or 2′-fluoro modifications;
[0186] modifications on N_{b} differ from the modification on Y and modifications on N_{b}′ differ from the modification on Y′;
[0187] where the sense strand includes at least one phosphorothioate linkage; and
[0188] where the sense strand is conjugated to at least one ligand, optionally where the ligand is one or more lipophilic, e.g., C16, ligands or one or more GalNAc derivatives.

[0189] Another aspect of the instant disclosure provides a double stranded RNAi agent for inhibiting expression of an ATXN2 gene in a cell, where the double stranded RNAi agent includes a sense strand complementary to an antisense strand, where the antisense strand includes a region complementary to part of an mRNA encoding ATXN2 (SEQ ID NO: 1, or a nucleotide sequence having at least 90% nucleotide sequence identity, e.g. 90, 91, 92, 93, 94, 95, 96, 97, 98, 99 or 100% identity, to the entire nucleotide sequence of SEQ ID NO: 1), where each strand is about 14 to about 30 nucleotides in length, where the double stranded RNAi agent is represented by formula (III):

(IIIa)
sense:
5′ nₚ-Nₐ-Y Y Y-Nₐ-n_{q} 3′
antisense:
3′ nₚ′-Nₐ′-Y′Y′Y′-Nₐ′-n_{q}′ 5′

[0190] where:
[0191] each nₚ, n_{q}, and n_{q}′, each of which may or may not be present, independently represents an overhang nucleotide;
[0192] p, q, and q′ are each independently 0-6;
[0193] nₚ′>0 and at least one nₚ′ is linked to a neighboring nucleotide via a phosphorothioate linkage;
[0194] each Nₐ and Nₐ′ independently represents an oligonucleotide sequence including 0-25 nucleotides which are either modified or unmodified or combinations thereof, each sequence including at least two differently modified nucleotides;
[0195] YYY and Y′Y′Y′ each independently represent one motif of three identical modifications on three consecutive nucleotides, and where the modifications are 2′-O-methyl or 2′-fluoro modifications;
[0196] where the sense strand includes at least one phosphorothioate linkage; and
[0197] where the sense strand is conjugated to at least one ligand, optionally where the ligand is one or more lipophilic, e.g., C16 ligands, or one or more GalNAc derivatives.

[0198] An additional aspect of the instant disclosure provides a double stranded RNAi agent for inhibiting expression of an ATXN2 gene, where the double stranded RNAi agent targeted to ATXN2 includes a sense strand and an antisense strand forming a double stranded region, where the sense strand includes at least 15 contiguous nucleotides differing by no more than 3 nucleotides (i.e., differing by 3, 2, 1, or 0 nucleotides) from any one of the nucleotide sequences of SEQ ID NOs: 1, 3, 5, and 7, or a nucleotide sequence having at least 90% nucleotide sequence identity, e.g. 90, 91, 92, 93, 94, 95, 96, 97, 98, 99 or 100% identity, to the entire nucleotide sequence of any one of SEQ ID NOs: 1, 3, 5, or 7, and the antisense strand includes at least 15 contiguous nucleotides differing by no more than 3 nucleotides (i.e., differing by 3, 2, 1, or 0 nucleotides) from any one of the nucleotide sequences of SEQ ID NOs: 2, 4, 6, and 8, or a nucleotide sequence having at least 90% nucleotide sequence identity, e.g. 90, 91, 92, 93, 94, 95, 96, 97, 98, 99 or 100% identity, to the entire nucleotide sequence of any one of SEQ ID NOs: 2, 4, 6, and 8; where a substitution of a uracil for any thymine in the sequences provided in the SEQ ID NOs: 1-8 (when comparing aligned sequences) does not count as a difference that contributes to the differing by no more than 3 nucleotides from any one of the nucleotide sequences provided in SEQ ID NOs: 1-8, where substantially all of the nucleotides of the sense strand include a modification that is a 2′-O-methyl modification, a GNA or a 2′-fluoro modification, where the sense strand includes two phosphorothioate internucleotide linkages at the 5′-terminus, where substantially all of the nucleotides of the antisense strand include a modification selected from the group consisting of a 2′-O-methyl modification and a 2′-fluoro modification, where the antisense strand includes two phosphorothioate internucleotide linkages at the 5′-terminus and two phosphorothioate internucleotide linkages at the 3′-terminus, and where the sense strand is conjugated to one or more lipophilic, e.g., C16, ligands, optionally, further comprising a liver targeting ligand, e.g., a ligand comprising one or more GalNAc derivatives.

[0199] Another aspect of the instant disclosure provides a double stranded RNAi agent for inhibiting expression of an ATXN2 gene, where the double stranded RNAi agent targeted to ATXN2 includes a sense strand and an antisense strand forming a double stranded region, where the sense strand includes at least 15 contiguous nucleotides differing by no more than 3 nucleotides (i.e., differing by 3, 2, 1, or 0 nucleotides) from any one of the nucleotide sequences of SEQ ID NOs: 1, 3, 5, and 7, or a nucleotide sequence having at least 90% nucleotide sequence identity, e.g. 90, 91, 92, 93, 94, 95, 96, 97, 98, 99 or 100% identity, to the entire nucleotide sequence of any one of SEQ ID NOs: 1, 3, 5, or 7, and the antisense strand includes at least 15 contiguous nucleotides differing by no more than 3 nucleotides (i.e., differing by 3, 2, 1, or 0 nucleotides) from any one of the nucleotide sequences of SEQ ID NOs: 2, 4, 6, and 8, or a nucleotide sequence having at least 90% nucleotide sequence identity, e.g. 90, 91, 92, 93, 94, 95, 96, 97, 98, 99 or 100% identity, to the entire nucleotide sequence of any one of SEQ ID NOs: 2, 4, 6, and 8, where a substitution of a uracil for any thymine in the sequences provided in the SEQ ID NOs: 1-8 (when comparing aligned sequences) does not count as a difference that contributes to the differing by no more than 3 nucleotides from any one of the nucleotide sequences provided in SEQ ID NOs: 1-8; where the sense strand includes at least one 3′-terminal deoxy-thymine nucleotide (dT), and where the antisense strand includes at least one 3′-terminal deoxy-thymine nucleotide (dT).

[0200] In one embodiment, all of the nucleotides of the sense strand and all of the nucleotides of the antisense strand are modified nucleotides.

[0201] In another embodiment, each strand has 19-30 nucleotides.

[0202] In certain embodiments, the antisense strand of the RNAi agent includes at least one thermally destabilizing modification of the duplex within the first 9 nucleotide positions of the 5′ region or a precursor thereof. Optionally, the thermally destabilizing modification of the duplex is one or more of

[chemical structure]

where B is nucleobase.

[0203] Another aspect of the instant disclosure provides a cell containing a double stranded RNAi agent of the instant disclosure.

[0204] An additional aspect of the instant disclosure provides a pharmaceutical composition for inhibiting expression of an ATXN2 gene that includes a double stranded RNAi agent of the instant disclosure.

[0205] In one embodiment, the double stranded RNAi agent is administered in an unbuffered solution. Optionally, the unbuffered solution is saline or water.

[0206] In another embodiment, the double stranded RNAi agent is administered with a buffer solution. Optionally, the buffer solution includes acetate, citrate, prolamine, carbonate, or phosphate or any combination thereof. In another embodiment, the buffer solution is phosphate buffered saline (PBS).

[0207] Another aspect of the disclosure provides a pharmaceutical composition that includes a double stranded RNAi agent of the instant disclosure and a lipid formulation.

[0208] In one embodiment, the lipid formulation includes a lipid nanoparticle (LNP).

[0209] Another aspect of the instant disclosure provides a kit for performing a method of the instant disclosure, the kit including: a) a double stranded RNAi agent of the instant disclosure, and b) instructions for use, and c) optionally, a device for administering the double stranded RNAi agent to the subject.

[0210] An additional aspect of the instant disclosure provides a double stranded ribonucleic acid (RNAi) agent for inhibiting expression of an ATXN2 gene, where the RNAi agent possesses a sense strand and an antisense strand, and where the antisense strand includes a region of complementarity which includes at least 15 contiguous nucleotides differing by no more than 3 nucleotides (i.e., differing by 3, 2, 1, or 0 nucleotides), e.g., at least 15 nucleotides (i.e., differing by 3, 2, 1, or 0 nucleotides), at least 19 nucleotides (i.e., differing by 3, 2, 1, or 0 nucleotides), from any one of the antisense strand nucleobase sequences of Tables 2, 3, 5, 6, 9 or 10. In one embodiment, the RNAi agent includes one or more of the following modifications: a 2′-O-methyl modified nucleotide, a 2′-fluoro modified nucleotide, a 2′-C-alkyl-modified nucleotide, a nucleotide comprising a glycol nucleic acid (GNA), a phosphorothioate (PS) and a vinyl phosphonate (VP). Optionally, the RNAi agent includes at least one of each of the following modifications: a 2′-O-methyl modified nucleotide, a 2′-fluoro modified nucleotide, a 2′-C-alkyl-modified nucleotide, a nucleotide comprising a glycol nucleic acid (GNA), a phosphorothioate and a vinyl phosphonate (VP).

[0211] In another embodiment, the RNAi agent includes four or more PS modifications, optionally six to ten PS modifications, optionally eight PS modifications.

[0212] In an additional embodiment, each of the sense strand and the antisense strand of the RNAi agent possesses a 5′-terminus and a 3′-terminus, and the RNAi agent includes eight PS modifications positioned at each of the penultimate and ultimate internucleotide linkages from the respective 3′- and 5′-termini of each of the sense and antisense strands of the RNAi agent.

[0213] In another embodiment, each of the sense strand and the antisense strand of the RNAi agent includes a 5′-terminus and a 3′-terminus, and the RNAi agent includes only one nucleotide including a GNA. Optionally, the nucleotide including a GNA is positioned on the antisense strand at the seventh nucleobase residue from the 5′-terminus of the antisense strand.

[0214] In an additional embodiment, each of the sense strand and the antisense strand of the RNAi agent includes a 5′-terminus and a 3′-terminus, and the RNAi agent includes one to four 2′-C-alkyl-modified nucleotides. Optionally, the 2′-C-alkyl-modified nucleotide is a 2′-C16-modified nucleotide. Optionally, the RNAi agent includes a single 2′-C-alkyl, e.g., C16-modified nucleotide. Optionally, the single 2′-C-alkyl, e.g., C16-modified nucleotide is located on the sense strand at the sixth nucleobase position from the 5′-terminus of the sense strand.

[0215] In another embodiment, each of the sense strand and the antisense strand of the RNAi agent includes a 5′-terminus and a 3′-terminus, and the RNAi agent includes two or more 2′-fluoro modified nucleotides. Optionally, each of the sense strand and the antisense strand of the RNAi agent includes two or more 2′-fluoro modified nucleotides. Optionally, the 2′-fluoro modified nucleotides are located on the sense strand at nucleobase positions 7, 9, 10 and 11 from the 5′-terminus of the sense strand and on the antisense strand at nucleobase positions 2, 14 and 16 from the 5′-terminus of the antisense strand.

[0216] In an additional embodiment, each of the sense strand and the antisense strand of the RNAi agent includes a 5′-terminus and a 3′-terminus, and the RNAi agent includes one or more VP modifications. Optionally, the RNAi agent includes a single VP modification at the 5′-terminus of the antisense strand.

[0217] In another embodiment, each of the sense strand and the antisense strand of the RNAi agent includes a 5′-terminus and a 3′-terminus, and the RNAi agent includes two or more 2′-O-methyl modified nucleotides. Optionally, the RNAi agent includes 2′-O-methyl modified nucleotides at all nucleobase locations not modified by a 2′-fluoro, a 2′-C-alkyl or a glycol nucleic acid (GNA). Optionally, the two or more 2′-O-methyl modified nucleotides are located on the sense strand at positions 1, 2, 3, 4, 5, 8, 12, 13, 14, 15, 16, 17, 18, 19, 20 and 21 from the 5′-terminus of the sense strand and on the antisense strand at positions 1, 3, 4, 5, 6, 8, 9, 10, 11, 12, 13, 15, 17, 18, 19, 20, 21, 22 and 23 from the 5′-terminus of the antisense strand.

### Definitions

[0218] That the present disclosure may be more readily understood, certain terms are first defined. In addition, it should be noted that whenever a value or range of values of a parameter are recited, it is intended that values and ranges intermediate to the recited values are also intended to be part of this disclosure.

[0219] The articles “a” and “an” are used herein to refer to one or to more than one (i.e., to at least one) of the grammatical object of the article. By way of example, “an element” means one element or more than one element, e.g., a plurality of elements.

[0220] The term “including” is used herein to mean, and is used interchangeably with, the phrase “including but not limited to”.

[0221] The term “or” is used herein to mean, and is used interchangeably with, the term “and/or,” unless context clearly indicates otherwise.

[0222] The term “about” is used herein to mean within the typical ranges of tolerances in the art. For example, “about” can be understood as about 2 standard deviations from the mean. In certain embodiments, about means±10%. In certain embodiments, about means±5%. When about is present before a series of numbers or a range, it is understood that “about” can modify each of the numbers in the series or range.

[0223] The term “at least” prior to a number or series of numbers is understood to include the number adjacent to the term “at least”, and all subsequent numbers or integers that could logically be included, as clear from context. For example, the number of nucleotides in a nucleic acid molecule must be an integer. For example, “at least 18 nucleotides of a 21 nucleotide nucleic acid molecule” means that 18, 19, 20, or 21 nucleotides have the indicated property. When at least is present before a series of numbers or a range, it is understood that “at least” can modify each of the numbers in the series or range.

[0224] As used herein, “no more than” or “less than” is understood as the value adjacent to the phrase and logical lower values or integers, as logical from context, to zero. For example, a duplex with an overhang of “no more than 2 nucleotides” has a 2, 1, or 0 nucleotide overhang. When “no more than” is present before a series of numbers or a range, it is understood that “no more than” can modify each of the numbers in the series or range. As used herein, ranges include both the upper and lower limit.

[0225] As used herein, methods of detection can include determination that the amount of analyte present is below the level of detection of the method.

[0226] In the event of a conflict between an indicated target site and the nucleotide sequence for a sense or antisense strand, the indicated sequence takes precedence.

[0227] In the event of a conflict between a chemical structure and a chemical name, the chemical structure takes precedence.

[0228] The term “ataxin 2” or “ATXN2”, also known as SCA2 and TNRC13, refers to a gene that belongs to a group of genes that is associated with microsatellite-expansion diseases, a class of neurological and neuromuscular disorders caused by expansion of short stretches of repetitive DNA. The protein encoded by the ATXN2 gene has two globular domains near the N-terminus, one of which contains a clathrin-mediated trans-Golgi signal and an endoplasmic reticulum exit signal. The encoded cytoplasmic protein localizes to the endoplasmic reticulum and plasma membrane, is involved in endocytosis, and modulates mTOR signals, modifying ribosomal translation and mitochondrial function. The N-terminal region of the protein contains a polyglutamine (polyQ) tract of 14-31 residues that can be expanded in the pathogenic state to 32-200 residues. Intermediate length expansions of this tract increase susceptibility to amyotrophic lateral sclerosis (ALS), while long expansions of this tract result in spinocerebellar ataxia-2 (the SCA2 disorder), an autosomal-dominantly inherited, neurodegenerative disorder. Alternative splicing results in multiple transcript variants. Nucleotide and amino acid sequences of ATXN2 may be found, for example, at GenBank Accession No. NM_002973.3 (Homo sapiens ATXN2, SEQ ID NO: 1, reverse complement, SEQ ID NO: 2); GenBank Accession No. XM_005572266.1 (Macaca fascicularis ATXN2, SEQ ID NO: 3, reverse complement, SEQ ID NO: 4); GenBank Accession No.: NM_009125.2 (Mus musculus ATXN2, SEQ ID NO: 5, reverse complement, SEQ ID NO: 6); and GenBank Accession No. XM_008769286.2 (Rattus norvegicus ATXN2, SEQ ID NO: 7, reverse complement, SEQ ID NO: 8). Additional examples of ATXN2 sequences can be found in publicly available databases, for example, GenBank, OMIM, UniProt, and the Macaca genome project web site (macaque.genomics.org.cn/page/species/index.jsp). Additional information on ATXN2 can be found, for example, at www.ncbi.nlm.nih.gov/gene/6311.

[0229] The entire contents of each of the foregoing GenBank Accession numbers and the Gene database numbers are incorporated herein by reference as of the date of filing this application.

[0230] The term “ATXN2” as used herein also refers to variations of the ATXN2 gene including naturally occurring sequence variants provided, for example, at UniProt and in NCBI dbSNP (see, e.g., www.ncbi.nlm.nih.gov/snp?LinkName=gene_snp&from_uid=6311, the entire contents of which is incorporated herein by reference as of the date of filing this application.

[0231] As used herein, “target sequence” refers to a contiguous portion of the nucleotide sequence of an mRNA molecule formed during the transcription of an ATXN2 gene, including mRNA that is a product of RNA processing of a primary transcription product. In one embodiment, the target portion of the sequence will be at least long enough to serve as a substrate for RNAi-directed cleavage at or near that portion of the nucleotide sequence of an mRNA molecule formed during the transcription of an ATXN2 gene. In one embodiment, the target sequence is within the protein coding region of the ATXN2 gene. In another embodiment, the target sequence is within the 3′ UTR of the ATXN2 gene.

[0232] The target sequence may be from about 9-36 nucleotides in length, e.g., about 15-30 nucleotides in length. For example, the target sequence can be from about 15-30 nucleotides, 15-29, 15-28, 15-27, 15-26, 15-25, 15-24, 15-23, 15-22, 15-21, 15-20, 15-19, 15-18, 15-17, 18-30, 18-29, 18-28, 18-27, 18-26, 18-25, 18-24, 18-23, 18-22, 18-21, 18-20, 19-30, 19-29, 19-28, 19-27, 19-26, 19-25, 19-24, 19-23, 19-22, 19-21, 19-20, 20-30, 20-29, 20-28, 20-27, 20-26, 20-25, 20-24,20-23, 20-22, 20-21, 21-30, 21-29, 21-28, 21-27, 21-26, 21-25, 21-24, 21-23, or 21-22 nucleotides in length. In some embodiments, the target sequence is about 19 to about 30 nucleotides in length. In other embodiments, the target sequence is about 19 to about 25 nucleotides in length. In still other embodiments, the target sequence is about 19 to about 23 nucleotides in length. In some embodiments, the target sequence is about 21 to about 23 nucleotides in length. Ranges and lengths intermediate to the above recited ranges and lengths are also contemplated to be part of the disclosure.

[0233] As used herein, the term “strand comprising a sequence” refers to an oligonucleotide comprising a chain of nucleotides that is described by the sequence referred to using the standard nucleotide nomenclature.

[0234] “G,” “C,” “A,” “T”, and “U” each generally stand for a nucleotide that contains guanine, cytosine, adenine, thymidine, and uracil as a base, respectively in the context of a modified or unmodified nucleotide. However, it will be understood that the term “ribonucleotide” or “nucleotide” can also refer to a modified nucleotide, as further detailed below, or a surrogate replacement moiety (see, e.g., Table 1). The skilled person is well aware that guanine, cytosine, adenine, thymidine, and uracil can be replaced by other moieties without substantially altering the base pairing properties of an oligonucleotide comprising a nucleotide bearing such replacement moiety. For example, without limitation, a nucleotide comprising inosine as its base can base pair with nucleotides containing adenine, cytosine, or uracil. Hence, nucleotides containing uracil, guanine, or adenine can be replaced in the nucleotide sequences of dsRNA featured in the disclosure by a nucleotide containing, for example, inosine. In another example, adenine and cytosine anywhere in the oligonucleotide can be replaced with guanine and uracil, respectively to form G-U Wobble base pairing with the target mRNA. Sequences containing such replacement moieties are suitable for the compositions and methods featured in the disclosure.

[0235] The terms “iRNA”, “RNAi agent,” “iRNA agent,” “RNA interference agent” as used interchangeably herein, refer to an agent that contains RNA as that term is defined herein, and which mediates the targeted cleavage of an RNA transcript via an RNA-induced silencing complex (RISC) pathway. RNA interference (RNAi) is a process that directs the sequence-specific degradation of mRNA. RNAi modulates, e.g., inhibits, the expression of ATXN2 in a cell, e.g., a cell within a subject, such as a mammalian subject.

[0236] In one embodiment, an RNAi agent of the disclosure includes a single stranded RNAi that interacts with a target RNA sequence, e.g., an ATXN2 target mRNA sequence, to direct the cleavage of the target RNA. Without wishing to be bound by theory it is believed that long double stranded RNA introduced into cells is broken down into double-stranded short interfering RNAs (siRNAs) comprising a sense strand and an antisense strand by a Type III endonuclease known as Dicer (Sharp et al. (2001) Genes Dev. 15: 485). Dicer, a ribonuclease-III-like enzyme, processes these dsRNA into 19-23 base pair short interfering RNAs with characteristic two base 3′ overhangs (Bernstein, et al., (2001) Nature 409: 363). These siRNAs are then incorporated into an RNA-induced silencing complex (RISC) where one or more helicases unwind the siRNA duplex, enabling the complementary antisense strand to guide target recognition (Nykanen, et al., (2001) Cell 107: 309). Upon binding to the appropriate target mRNA, one or more endonucleases within the RISC cleave the target to induce silencing (Elbashir, et al., (2001) Genes Dev. 15: 188). Thus, in one aspect the disclosure relates to a single stranded RNA (ssRNA) (the antisense strand of a siRNA duplex) generated within a cell and which promotes the formation of a RISC complex to effect silencing of the target gene, i.e., an ATXN2 gene. Accordingly, the term “siRNA” is also used herein to refer to an RNAi as described above.

[0237] In another embodiment, the RNAi agent may be a single-stranded RNA that is introduced into a cell or organism to inhibit a target mRNA. Single-stranded RNAi agents bind to the RISC endonuclease, Argonaute 2, which then cleaves the target mRNA. The single-stranded siRNAs are generally 15-30 nucleotides and are chemically modified. The design and testing of single-stranded RNAs are described in U.S. Pat. No. 8,101,348 and in Lima et al., (2012) Cell 150: 883-894, the entire contents of each of which are hereby incorporated herein by reference. Any of the antisense nucleotide sequences described herein may be used as a single-stranded siRNA as described herein or as chemically modified by the methods described in Lima et al., (2012) Cell 150: 883-894.

[0238] In another embodiment, a “RNAi agent” for use in the compositions and methods of the disclosure is a double stranded RNA and is referred to herein as a “double stranded RNAi agent,” “double stranded RNA (dsRNA) molecule,” “dsRNA agent,” or “dsRNA”. The term “dsRNA” refers to a complex of ribonucleic acid molecules, having a duplex structure comprising two anti-parallel and substantially complementary nucleic acid strands, referred to as having “sense” and “antisense” orientations with respect to a target RNA, i.e., an ATXN2 gene. In some embodiments of the disclosure, a double stranded RNA (dsRNA) triggers the degradation of a target RNA, e.g., an mRNA, through a post-transcriptional gene-silencing mechanism referred to herein as RNA interference or RNAi.

[0239] In general, a dsRNA molecule can include ribonucleotides, but as described in detail herein, each or both strands can also include one or more non-ribonucleotides, e.g., a deoxyribonucleotide, a modified nucleotide. In addition, as used in this specification, an “RNAi agent” may include ribonucleotides with chemical modifications; an RNAi agent may include substantial modifications at multiple nucleotides.

[0240] As used herein, the term “modified nucleotide” refers to a nucleotide having, independently, a modified sugar moiety, a modified internucleotide linkage, or a modified nucleobase. Thus, the term modified nucleotide encompasses substitutions, additions or removal of, e.g., a functional group or atom, to internucleoside linkages, sugar moieties, or nucleobases. The modifications suitable for use in the agents of the disclosure include all types of modifications disclosed herein or known in the art. Any such modifications, as used in a siRNA type molecule, are encompassed by “RNAi agent” for the purposes of this specification and claims.

[0241] In certain embodiments of the instant disclosure, inclusion of a deoxy-nucleotide—which is acknowledged as a naturally occurring form of nucleotide—if present within an RNAi agent can be considered to constitute a modified nucleotide.

[0242] The duplex region may be of any length that permits specific degradation of a desired target RNA through a RISC pathway, and may range from about 9 to 36 base pairs in length, e.g., about 15-30 base pairs in length, for example, about 9, 10, 11, 12, 13, 14, 15, 16, 17, 18, 19, 20, 21, 22, 23, 24, 25, 26, 27, 28, 29, 30, 31, 32, 33, 34, 35, or 36 base pairs in length, such as about 15-30, 15-29, 15-28, 15-27, 15-26, 15-25, 15-24, 15-23, 15-22, 15-21, 15-20, 15-19, 15-18, 15-17, 18-30, 18-29, 18-28, 18-27, 18-26, 18-25, 18-24, 18-23, 18-22, 18-21, 18-20, 19-30, 19-29, 19-28, 19-27, 19-26, 19-25, 19-24, 19-23, 19-22, 19-21, 19-20, 20-30, 20-29, 20-28, 20-27, 20-26, 20-25, 20-24,20-23, 20-22, 20-21, 21-30, 21-29, 21-28, 21-27, 21-26, 21-25, 21-24, 21-23, or 21-22 base pairs in length. Ranges and lengths intermediate to the above recited ranges and lengths are also contemplated to be part of the invention.

[0243] The two strands forming the duplex structure may be different portions of one larger RNA molecule, or they may be separate RNA molecules. Where the two strands are part of one larger molecule, and therefore are connected by an uninterrupted chain of nucleotides between the 3′-end of one strand and the 5′-end of the respective other strand forming the duplex structure, the connecting RNA chain is referred to as a “hairpin loop.” A hairpin loop can comprise at least one unpaired nucleotide. In some embodiments, the hairpin loop can comprise at at least 4, at least 5, at least 6, at least 7, at least 8, at least 9, at least 10, at least 20, at least 23 or more unpaired nucleotides or nucleotides not directed to the target site of the dsRNA. In some embodiments, the hairpin loop can be 10 or fewer nucleotides. In some embodiments, the hairpin loop can be 8 or fewer unpaired nucleotides. In some embodiments, the hairpin loop can be 4-10 unpaired nucleotides. In some embodiments, the hairpin loop can be 4-8 nucleotides.

[0244] In certain embodiments, the two strands of double-stranded oligomeric compound can be linked together. The two strands can be linked to each other at both ends, or at one end only. By linking at one end is meant that 5′-end of first strand is linked to the 3′-end of the second strand or 3′-end of first strand is linked to 5′-end of the second strand. When the two strands are linked to each other at both ends, 5′-end of first strand is linked to 3′-end of second strand and 3′-end of first strand is linked to 5′-end of second strand. The two strands can be linked together by an oligonucleotide linker including, but not limited to, (N)n; wherein N is independently a modified or unmodified nucleotide and n is 3-23. In some embodiments, n is 3-10, e.g., 3, 4, 5, 6, 7, 8, 9, or 10. In some embodiments, the oligonucleotide linker is selected from the group consisting of GNRA, (G)₄, (U)₄, and (dT)₄, wherein N is a modified or unmodified nucleotide and R is a modified or unmodified purine nucleotide. Some of the nucleotides in the linker can be involved in base-pair interactions with other nucleotides in the linker. The two strands can also be linked together by a non-nucleosidic linker, e.g. a linker described herein. It will be appreciated by one of skill in the art that any oligonucleotide chemical modifications or variations describe herein can be used in the oligonucleotide linker.

[0245] Hairpin and dumbbell type oligomeric compounds will have a duplex region equal to or at least 14, 15, 15, 16, 17, 18, 19, 29, 21, 22, 23, 24, or 25 nucleotide pairs. The duplex region can be equal to or less than 200, 100, or 50, in length. In some embodiments, ranges for the duplex region are 15-30, 17 to 23, 19 to 23, and 19 to 21 nucleotides pairs in length.

[0246] The hairpin oligomeric compounds can have a single strand overhang or terminal unpaired region, in some embodiments at the 3′, and in some embodiments on the antisense side of the hairpin. In some embodiments, the overhangs are 1-4, more generally 2-3 nucleotides in length. The hairpin oligomeric compounds that can induce RNA interference are also referred to as “shRNA” herein.

[0247] Where the two substantially complementary strands of a dsRNA are comprised by separate RNA molecules, those molecules need not, but can be covalently connected. Where the two strands are connected covalently by means other than an uninterrupted chain of nucleotides between the 3′-end of one strand and the 5′-end of the respective other strand forming the duplex structure, the connecting structure is referred to as a “linker.” The RNA strands may have the same or a different number of nucleotides. The maximum number of base pairs is the number of nucleotides in the shortest strand of the dsRNA minus any overhangs that are present in the duplex. In addition to the duplex structure, an RNAi may comprise one or more nucleotide overhangs.

[0248] In one embodiment, an RNAi agent of the disclosure is a dsRNA, each strand of which is 24-30 nucleotides in length, that interacts with a target RNA sequence, e.g., an ATXN2 target mRNA sequence, to direct the cleavage of the target RNA. Without wishing to be bound by theory, long double stranded RNA introduced into cells is broken down into siRNA by a Type III endonuclease known as Dicer (Sharp et al. (2001) Genes Dev. 15: 485). Dicer, a ribonuclease-III-like enzyme, processes the dsRNA into 19-23 base pair short interfering RNAs with characteristic two base 3′ overhangs (Bernstein, et al., (2001) Nature 409: 363). The siRNAs are then incorporated into an RNA-induced silencing complex (RISC) where one or more helicases unwind the siRNA duplex, enabling the complementary antisense strand to guide target recognition (Nykanen, et al., (2001) Cell 107: 309). Upon binding to the appropriate target mRNA, one or more endonucleases within the RISC cleave the target to induce silencing (Elbashir, et al., (2001) Genes Dev. 15: 188).

[0249] In one embodiment, an RNAi agent of the disclosure is a dsRNA agent, each strand of which comprises 19-23 nucleotides that interacts with an ATXN2 RNA sequence to direct the cleavage of the target RNA. Without wishing to be bound by theory, long double stranded RNA introduced into cells is broken down into siRNA by a Type III endonuclease known as Dicer (Sharp et al. (2001) Genes Dev. 15: 485). Dicer, a ribonuclease-III-like enzyme, processes the dsRNA into 19-23 base pair short interfering RNAs with characteristic two base 3′ overhangs (Bernstein, et al., (2001) Nature 409: 363). The siRNAs are then incorporated into an RNA-induced silencing complex (RISC) where one or more helicases unwind the siRNA duplex, enabling the complementary antisense strand to guide target recognition (Nykanen, et al., (2001) Cell 107: 309). Upon binding to the appropriate target mRNA, one or more endonucleases within the RISC cleave the target to induce silencing (Elbashir, et al., (2001) Genes Dev. 15: 188). In one embodiment, an RNAi agent of the disclosure is a dsRNA of 24-30 nucleotides that interacts with an ATXN2 RNA sequence to direct the cleavage of the target RNA.

[0250] As used herein, the term “nucleotide overhang” refers to at least one unpaired nucleotide that protrudes from the duplex structure of an RNAi agent, e.g., a dsRNA. For example, when a 3′-end of one strand of a dsRNA extends beyond the 5′-end of the other strand, or vice versa, there is a nucleotide overhang. A dsRNA can comprise an overhang of at least one nucleotide; alternatively, the overhang can comprise at least two nucleotides, at least three nucleotides, at least four nucleotides, at least five nucleotides or more. A nucleotide overhang can comprise or consist of a nucleotide/nucleoside analog, including a deoxynucleotide/nucleoside. The overhang(s) can be on the sense strand, the antisense strand or any combination thereof. Furthermore, the nucleotide(s) of an overhang can be present on the 5′-end, 3′-end or both ends of either an antisense or sense strand of a dsRNA.

[0251] In one embodiment of the dsRNA, at least one strand comprises a 3′ overhang of at least 1 nucleotide. In another embodiment, at least one strand comprises a 3′ overhang of at least 2 nucleotides, e.g., 2, 3, 4, 5, 6, 7, 9, 10, 11, 12, 13, 14, or 15 nucleotides. In other embodiments, at least one strand of the RNAi agent comprises a 5′ overhang of at least 1 nucleotide. In certain embodiments, at least one strand comprises a 5′ overhang of at least 2 nucleotides, e.g., 2, 3, 4, 5, 6, 7, 9, 10, 11, 12, 13, 14, or 15 nucleotides. In still other embodiments, both the 3′ and the 5′ end of one strand of the RNAi agent comprise an overhang of at least 1 nucleotide.

[0252] In one embodiment, the antisense strand of a dsRNA has a 1-10 nucleotide, e.g., 0-3, 1-3, 2-4, 2-5, 4-10, 5-10, e.g., a 1, 2, 3, 4, 5, 6, 7, 8, 9, or 10 nucleotide, overhang at the 3′-end, the 5′-end, at both ends, or at neither end. In one embodiment, the sense strand of a dsRNA has a 1-10 nucleotide, e.g., a 1, 2, 3, 4, 5, 6, 7, 8, 9, or 10 nucleotide, overhang at the 3′-end, the 5′-end, at both ends, or at neither end. In another embodiment, one or more of the nucleotides in the overhang is replaced with a nucleoside thiophosphate.

[0253] In certain embodiments, the overhang on the sense strand or the antisense strand, or both, can include extended lengths longer than 10 nucleotides, e.g., 1-30 nucleotides, 2-30 nucleotides, 10-30 nucleotides, or 10-15 nucleotides in length. In certain embodiments, an extended overhang is on the sense strand of the duplex. In certain embodiments, an extended overhang is present on the 3′end of the sense strand of the duplex. In certain embodiments, an extended overhang is present on the 5′end of the sense strand of the duplex. In certain embodiments, an extended overhang is on the antisense strand of the duplex. In certain embodiments, an extended overhang is present on the 3′end of the antisense strand of the duplex. In certain embodiments, an extended overhang is present on the 5′end of the antisense strand of the duplex. In certain embodiments, one or more of the nucleotides in the overhang is replaced with a nucleoside thiophosphate. In certain embodiments, the overhang includes a self-complementary portion such that the overhang is capable of forming a hairpin structure that is stable under physiological conditions.

[0254] The terms “blunt” or “blunt ended” as used herein in reference to a dsRNA mean that there are no unpaired nucleotides or nucleotide analogs at a given terminal end of a dsRNA, i.e., no nucleotide overhang. One or both ends of a dsRNA can be blunt. Where both ends of a dsRNA are blunt, the dsRNA is said to be blunt ended. To be clear, a “blunt ended” dsRNA is a dsRNA that is blunt at both ends, i.e., no nucleotide overhang at either end of the molecule. Most often such a molecule will be double stranded over its entire length.

[0255] The term “antisense strand” or “guide strand” refers to the strand of an RNAi agent, e.g., a dsRNA, which includes a region that is substantially complementary to a target sequence, e.g., an ATXN2 mRNA.

[0256] As used herein, the term “region of complementarity” refers to the region on the antisense strand that is substantially complementary to a sequence, for example a target sequence, e.g., an ATXN2 nucleotide sequence, as defined herein. Where the region of complementarity is not fully complementary to the target sequence, the mismatches can be in the internal or terminal regions of the molecule. Generally, the most tolerated mismatches are in the terminal regions, e.g., within 5, 4, 3, or 2 nucleotides of the 5′- or 3′-terminus of the RNAi agent.

[0257] In some embodiments, a double stranded RNA agent of the disclosure includes a nucleotide mismatch in the antisense strand.

[0258] In some embodiments, the antisense strand of the double stranded RNA agent of the disclosure includes no more than 4 mismatches with the target mRNA, e.g., the antisense strand includes 4, 3, 2, 1, or 0 mismatches with the target mRNA. In some embodiments, the antisense strand double stranded RNA agent of the disclosure includes no more than 4 mismatches with the sense strand, e.g., the antisense strand includes 4, 3, 2, 1, or 0 mismatches with the sense strand. In some embodiments, a double stranded RNA agent of the disclosure includes a nucleotide mismatch in the sense strand. In some embodiments, the sense strand of the double stranded RNA agent of the invention includes no more than 4 mismatches with the antisense strand, e.g., the sense strand includes 4, 3, 2, 1, or 0 mismatches with the antisense strand. In some embodiments, the nucleotide mismatch is, for example, within 5, 4, 3 nucleotides from the 3′-end of the iRNA. In another embodiment, the nucleotide mismatch is, for example, in the 3′-terminal nucleotide of the iRNA agent. In some embodiments, the mismatch(s) is not in the seed region.

[0259] Thus, an RNAi agent as described herein can contain one or more mismatches to the target sequence. In one embodiment, an RNAi agent as described herein contains no more than 3 mismatches (i.e., 3, 2, 1, or 0 mismatches). In one embodiment, an RNAi agent as described herein contains no more than 2 mismatches. In one embodiment, an RNAi agent as described herein contains no more than 1 mismatch. In one embodiment, an RNAi agent as described herein contains 0 mismatches. In certain embodiments, if the antisense strand of the RNAi agent contains mismatches to the target sequence, the mismatch can optionally be restricted to be within the last 5 nucleotides from either the 5′- or 3′-end of the region of complementarity. For example, in such embodiments, for a 23 nucleotide RNAi agent, the strand which is complementary to a region of an ATXN2 gene, generally does not contain any mismatch within the central 13 nucleotides. The methods described herein or methods known in the art can be used to determine whether an RNAi agent containing a mismatch to a target sequence is effective in inhibiting the expression of an ATXN2 gene. Consideration of the efficacy of RNAi agents with mismatches in inhibiting expression of an ATXN2 gene is important, especially if the particular region of complementarity in an ATXN2 gene is known to have polymorphic sequence variation within the population.

[0260] The term “sense strand” or “passenger strand” as used herein, refers to the strand of an RNAi agent that includes a region that is substantially complementary to a region of the antisense strand as that term is defined herein.

[0261] As used herein, “substantially all of the nucleotides are modified” are largely but not wholly modified and can include not more than 5, 4, 3, 2, or 1 unmodified nucleotides.

[0262] As used herein, the term “cleavage region” refers to a region that is located immediately adjacent to the cleavage site. The cleavage site is the site on the target at which cleavage occurs. In some embodiments, the cleavage region comprises three bases on either end of, and immediately adjacent to, the cleavage site. In some embodiments, the cleavage region comprises two bases on either end of, and immediately adjacent to, the cleavage site. In some embodiments, the cleavage site specifically occurs at the site bound by nucleotides 10 and 11 of the antisense strand, and the cleavage region comprises nucleotides 11, 12 and 13.

[0263] As used herein, and unless otherwise indicated, the term “complementary,” when used to describe a first nucleotide sequence in relation to a second nucleotide sequence, refers to the ability of an oligonucleotide or polynucleotide comprising the first nucleotide sequence to hybridize and form a duplex structure under certain conditions with an oligonucleotide or polynucleotide comprising the second nucleotide sequence, as will be understood by the skilled person. Such conditions can, for example, be stringent conditions, where stringent conditions can include: 400 mM NaCl, 40 mM PIPES pH 6.4, 1 mM EDTA, 50° C. or 70° C. for 12-16 hours followed by washing (see, e.g., “Molecular Cloning: A Laboratory Manual, Sambrook, et al. (1989) Cold Spring Harbor Laboratory Press). Other conditions, such as physiologically relevant conditions as can be encountered inside an organism, can apply. The skilled person will be able to determine the set of conditions most appropriate for a test of complementarity of two sequences in accordance with the ultimate application of the hybridized nucleotides.

[0264] Complementary sequences within an RNAi agent, e.g., within a dsRNA as described herein, include base-pairing of the oligonucleotide or polynucleotide comprising a first nucleotide sequence to an oligonucleotide or polynucleotide comprising a second nucleotide sequence over the entire length of one or both nucleotide sequences. Such sequences can be referred to as “fully complementary” with respect to each other herein. However, where a first sequence is referred to as “substantially complementary” with respect to a second sequence herein, the two sequences can be fully complementary, or they can form one or more, but generally not more than 5, 4, 3 or 2 mismatched base pairs upon hybridization for a duplex up to 30 base pairs, while retaining the ability to hybridize under the conditions most relevant to their ultimate application, e.g., inhibition of gene expression via a RISC pathway. However, where two oligonucleotides are designed to form, upon hybridization, one or more single stranded overhangs, such overhangs shall not be regarded as mismatches with regard to the determination of complementarity. For example, a dsRNA comprising one oligonucleotide 21 nucleotides in length and another oligonucleotide 23 nucleotides in length, wherein the longer oligonucleotide comprises a sequence of 21 nucleotides that is fully complementary to the shorter oligonucleotide, can yet be referred to as “fully complementary” for the purposes described herein.

[0265] “Complementary” sequences, as used herein, can also include, or be formed entirely from, non-Watson-Crick base pairs or base pairs formed from non-natural and modified nucleotides, in so far as the above requirements with respect to their ability to hybridize are fulfilled. Such non-Watson-Crick base pairs include, but are not limited to, G:U Wobble or Hoogstein base pairing.

[0266] The terms “complementary,” “fully complementary” and “substantially complementary” herein can be used with respect to the base matching between the sense strand and the antisense strand of a dsRNA, or between the antisense strand of an RNAi agent and a target sequence, as will be understood from the context of their use.

[0267] As used herein, a polynucleotide that is “substantially complementary to at least part of” a messenger RNA (mRNA) refers to a polynucleotide that is substantially complementary to a contiguous portion of the mRNA of interest (e.g., an mRNA encoding ATXN2). For example, a polynucleotide is complementary to at least a part of an ATXN2 mRNA if the sequence is substantially complementary to a non-interrupted portion of an mRNA encoding ATXN2.

[0268] Accordingly, in some embodiments, the antisense strand polynucleotides disclosed herein are fully complementary to the target ATXN2 sequence.

[0269] In certain embodiments, the antisense strand polynucleotides disclosed herein are substantially complementary to the target ATXN2 sequence and comprise a contiguous nucleotide sequence which is at least about 80% complementary over its entire length to the equivalent region of the nucleotide sequence of SEQ ID NOs: 1, 3, 5, or 7 for ATXN2, or a fragment of SEQ ID NOs: 1, 3, 5, or 7, such as about 85%, about 86%, about 87%, about 88%, about 89%, about 90%, about 91%, about 92%, about 93%, about 94%, about 95%, about 96%, about 97%, about 98%, or about 99% complementary.

[0270] In other embodiments, the antisense polynucleotides disclosed herein are substantially complementary to the target ATXN2 sequence and comprise a contiguous nucleotide sequence which is at least about 80% complementary over its entire length to any one of the sense strand nucleotide sequences in any one of Tables 2, 3, 5, 6, 9 or 10, or a fragment of any one of the sense strand nucleotide sequences in any one of Tables 2, 3, 5, 6, 9 or 10, such as about 85%, about 86%, about 87%, about 88%, about 89%, about 90%, about 91%, about 92%, about 93%, about 94%, about 95%, about 96%, about 97%, about 98%, or about 99% complementary.

[0271] In one embodiment, an RNAi agent of the disclosure includes a sense strand that is substantially complementary to an antisense polynucleotide which, in turn, is the same as a target ATXN2 sequence, and wherein the sense strand polynucleotide comprises a contiguous nucleotide sequence which is at least about 80% complementary over its entire length to the equivalent region of the nucleotide sequence of SEQ ID NOs: 2, 4, 6, or 8, or a fragment of any one of SEQ ID NOs: 2, 4, 6, or 8, such as about 85%, about 86%, about 87%, about 88%, about 89%, about 90%, about 91%, about 92%, about 93%, about 94%, about 95%, about 96%, about 97%, about 98%, or about 99% complementary.

[0272] In some embodiments, an iRNA of the disclosure includes a sense strand that is substantially complementary to an antisense polynucleotide which, in turn, is complementary to a target ATXN2 sequence, and wherein the sense strand polynucleotide comprises a contiguous nucleotide sequence which is at least about 80% complementary over its entire length to any one of the antisense strand nucleotide sequences in any one of any one of Tables 2, 3, 5, 6, 9 or 10, or a fragment of any one of the antisense strand nucleotide sequences in any one of Tables 2, 3, 5, 6, 9 or 10, such as about 85%, about 90%, about 91%, about 92%, about 93%, about 94%, about 95%, about 96%, about 97%, about 98%, about 99%, or 100% complementary

[0273] In some embodiments, the double-stranded region of a double-stranded iRNA agent is equal to or at least, 10, 11, 12, 13, 14, 15, 16, 17, 18, 19, 20, 21, 22, 23, 23, 24, 25, 26, 27, 28, 29, 30 or more nucleotide pairs in length.

[0274] In some embodiments, the antisense strand of a double-stranded iRNA agent is equal to or at least 14, 15, 16, 17, 18, 19, 20, 21, 22, 23, 23, 24, 25, 26, 27, 28, 29, or 30 nucleotides in length.

[0275] In some embodiments, the sense strand of a double-stranded iRNA agent is equal to or at least 10, 11, 12, 13, 14, 15, 16, 17, 18, 19, 20, 21, 22, 23, 23, 24, 25, 26, 27, 28, 29, or 30 nucleotides in length.

[0276] In one embodiment, the sense and antisense strands of the double-stranded iRNA agent are each 15 to 30 nucleotides in length.

[0277] In one embodiment, the sense and antisense strands of the double-stranded iRNA agent are each 19 to 25 nucleotides in length.

[0278] In one embodiment, the sense and antisense strands of the double-stranded iRNA agent are each 21 to 23 nucleotides in length.

[0279] In one embodiment, the sense strand of the iRNA agent is 21-nucleotides in length, and the antisense strand is 23-nucleotides in length, wherein the strands form a double-stranded region of 21 consecutive base pairs having a 2-nucleotide long single stranded overhangs at the 3′-end.

[0280] In some embodiments, the majority of nucleotides of each strand are ribonucleotides, but as described in detail herein, each or both strands can also include one or more non-ribonucleotides, e.g., a deoxyribonucleotide or a modified nucleotide. In addition, an “iRNA” may include ribonucleotides with chemical modifications. Such modifications may include all types of modifications disclosed herein or known in the art. Any such modifications, as used in an iRNA molecule, are encompassed by “iRNA” for the purposes of this specification and claims.

[0281] In one aspect of the disclosure, an agent for use in the methods and compositions of the disclosure is a single-stranded antisense nucleic acid molecule that inhibits a target mRNA via an antisense inhibition mechanism. The single-stranded antisense RNA molecule is complementary to a sequence within the target mRNA. The single-stranded antisense oligonucleotides can inhibit translation in a stoichiometric manner by base pairing to the mRNA and physically obstructing the translation machinery, see Dias, N. et al., (2002)Mol Cancer Ther 1: 347-355. The single-stranded antisense RNA molecule may be about 15 to about 30 nucleotides in length and have a sequence that is complementary to a target sequence. For example, the single-stranded antisense RNA molecule may comprise a sequence that is at least about 15, 16, 17, 18, 19, 20, or more contiguous nucleotides from any one of the antisense sequences described herein.

[0282] In one embodiment, at least partial suppression of the expression of an ATXN2 gene, is assessed by a reduction of the amount of ATXN2 mRNA which can be isolated from or detected in a first cell or group of cells in which an ATXN2 gene is transcribed and which has or have been treated such that the expression of an ATXN2 gene is inhibited, as compared to a second cell or group of cells substantially identical to the first cell or group of cells but which has or have not been so treated (control cells). The degree of inhibition may be expressed in terms of:

$$\frac{( mRNA in control cells ) - ( mRNA in treated cells )}{( mRNA in control cells )} •100 \%$$

[0283] The phrase “contacting a cell with an RNAi agent,” such as a dsRNA, as used herein, includes contacting a cell by any possible means. Contacting a cell with an RNAi agent includes contacting a cell in vitro with the RNAi agent or contacting a cell in vivo with the RNAi agent. The contacting may be done directly or indirectly. Thus, for example, the RNAi agent may be put into physical contact with the cell by the individual performing the method, or alternatively, the RNAi agent may be put into a situation that will permit or cause it to subsequently come into contact with the cell.

[0284] Contacting a cell in vitro may be done, for example, by incubating the cell with the RNAi agent. Contacting a cell in vivo may be done, for example, by injecting the RNAi agent into or near the tissue where the cell is located, or by injecting the RNAi agent into another area, e.g., the central nervous system (CNS), optionally via intrathecal, intravitreal or other injection, or to the bloodstream or the subcutaneous space, such that the agent will subsequently reach the tissue where the cell to be contacted is located. For example, the RNAi agent may contain or be coupled to a ligand, e.g., a lipophilic moiety or moieties as described below and further detailed, e.g., in PCT/US2019/031170, which is incorporated herein by reference, that directs or otherwise stabilizes the RNAi agent at a site of interest, e.g., the CNS. In some embodiments, the RNAi agent may contain or be coupled to a ligand, e.g., one or more GalNAc derivatives as described below, that directs or otherwise stabilizes the RNAi agent at a site of interest, e.g., the liver. In other embodiments, the RNAi agent may contain or be coupled to a lipophilic moiety or moieties and one or more GalNAc derivatives. Combinations of in vitro and in vivo methods of contacting are also possible. For example, a cell may also be contacted in vitro with an RNAi agent and subsequently transplanted into a subject.

[0285] In one embodiment, contacting a cell with an RNAi agent includes “introducing” or “delivering the RNAi agent into the cell” by facilitating or effecting uptake or absorption into the cell. Absorption or uptake of an RNAi agent can occur through unaided diffusive or active cellular processes, or by auxiliary agents or devices. Introducing an RNAi agent into a cell may be in vitro or in vivo. For example, for in vivo introduction, an RNAi agent can be injected into a tissue site or administered systemically. In vitro introduction into a cell includes methods known in the art such as electroporation and lipofection. Further approaches are described herein below or are known in the art.

[0286] The term “lipophile” or “lipophilic moiety” broadly refers to any compound or chemical moiety having an affinity for lipids. One way to characterize the lipophilicity of the lipophilic moiety is by the octanol-water partition coefficient, logKow, where K_{ow} is the ratio of a chemical's concentration in the octanol-phase to its concentration in the aqueous phase of a two-phase system at equilibrium. The octanol-water partition coefficient is a laboratory-measured property of a substance. However, it may also be predicted by using coefficients attributed to the structural components of a chemical which are calculated using first-principle or empirical methods (see, for example, Tetko et al., J. Chem. Inf Comput. Sci. 41: 1407-21 (2001), which is incorporated herein by reference in its entirety). It provides a thermodynamic measure of the tendency of the substance to prefer a non-aqueous or oily milieu rather than water (i.e. its hydrophilic/lipophilic balance). In principle, a chemical substance is lipophilic in character when its logK_{ow} exceeds 0. Typically, the lipophilic moiety possesses a logK_{ow} exceeding 1, exceeding 1.5, exceeding 2, exceeding 3, exceeding 4, exceeding 5, or exceeding 10. For instance, the logK_{ow} of 6-amino hexanol, for instance, is predicted to be approximately 0.7. Using the same method, the logK_{ow} of cholesteryl N-(hexan-6-ol) carbamate is predicted to be 10.7.

[0287] The lipophilicity of a molecule can change with respect to the functional group it carries. For instance, adding a hydroxyl group or amine group to the end of a lipophilic moiety can increase or decrease the partition coefficient (e.g., logKow) value of the lipophilic moiety.

[0288] Alternatively, the hydrophobicity of the double-stranded RNAi agent, conjugated to one or more lipophilic moieties, can be measured by its protein binding characteristics. For instance, in certain embodiments, the unbound fraction in the plasma protein binding assay of the double-stranded RNAi agent could be determined to positively correlate to the relative hydrophobicity of the double-stranded RNAi agent, which could then positively correlate to the silencing activity of the double-stranded RNAi agent.

[0289] In one embodiment, the plasma protein binding assay determined is an electrophoretic mobility shift assay (EMSA) using human serum albumin protein. An exemplary protocol of this binding assay is illustrated in detail in, e.g., PCT/US2019/031170. The hydrophobicity of the double-stranded RNAi agent, measured by fraction of unbound siRNA in the binding assay, exceeds 0.15, exceeds 0.2, exceeds 0.25, exceeds 0.3, exceeds 0.35, exceeds 0.4, exceeds 0.45, or exceeds 0.5 for an enhanced in vivo delivery of siRNA.

[0290] Accordingly, conjugating the lipophilic moieties to the internal position(s) of the double-stranded RNAi agent provides optimal hydrophobicity for the enhanced in vivo delivery of siRNA.

[0291] The term “lipid nanoparticle” or “LNP” refers to a vesicle comprising a lipid layer encapsulating a pharmaceutically active molecule, such as a nucleic acid molecule, e.g., an RNAi agent or a plasmid from which an RNAi agent is transcribed. LNPs are described in, for example, U.S. Pat. Nos. 6,858,225, 6,815,432, 8,158,601, and 8,058,069, the entire contents of which are hereby incorporated herein by reference.

[0292] As used herein, a “subject” is an animal, such as a mammal, including a primate (such as a human, a non-human primate, e.g., a monkey, and a chimpanzee), or a non-primate (such as a a rat, or a mouse). In a preferred embodiment, the subject is a human, such as a human being treated or assessed for a disease, disorder, or condition that would benefit from reduction in ATXN2 expression; a human at risk for a disease, disorder, or condition that would benefit from reduction in ATXN2 expression; a human having a disease, disorder, or condition that would benefit from reduction in ATXN2 expression; or human being treated for a disease, disorder, or condition that would benefit from reduction in ATXN2 expression as described herein.

[0293] As used herein, the terms “treating” or “treatment” refer to a beneficial or desired result including, but not limited to, alleviation or amelioration of one or more signs or symptoms associated with ATXN2 gene expression or ATXN2 protein production, e.g., ATXN2-associated neurodegenerative disease, e.g., spinocerebellar ataxias (SCAs, e.g., SCA2), Amyotrophic Lateral Sclerosis (ALS), and frontotemporal dementia (FTD), decreased expression or activity of ATXN2 in regions of increased neuronal dysfunction or death, in subjects having such neurodegenerative diseases. “Treatment” can also mean prolonging survival as compared to expected survival in the absence of treatment.

[0294] The term “lower” in the context of the level of ATXN2 in a subject or a disease marker or symptom refers to a statistically significant decrease in such level. The decrease can be, for example, at least 10%, 15%, 20%, 25%, 30%, %, 40%, 45%, 50%, 55%, 60%, 65%, 70%, 75%, 80%, 85%, 90%, 95%, or more. In certain embodiments, a decrease is at least 20%. In certain embodiments, the decrease is at least 50% in a disease marker, e.g., protein or gene expression level. “Lower” in the context of the level of ATXN2 in a subject is optionally down to a level accepted as within the range of normal for an individual without such disorder. In certain embodiments, “lower” is the decrease in the difference between the level of a marker or symptom for a subject suffering from a disease and a level accepted within the range of normal for an individual, e.g., the level of decrease in ataxia between an individual having SCA and an individual not having SCA or having symptoms that are within the range of normal.

[0295] As used herein, “prevention” or “preventing,” when used in reference to a disease or disorder, that would benefit from a reduction in expression of an ATXN2 gene or production of ATXN2 protein, e.g., in a subject susceptible to an ATXN2-associated disorder due to, e.g., genetic factors or age, wherein the subject does not yet meet the diagnostic criteria for the ATXN2-associated disorder. As used herein, prevention can be understood as administration of an agent to a subject who does not yet meet the diagnostic criteria for the ATXN2-associated disorder to delay or reduce the likelihood that the subject will develop the ATXN2-associated disorder. As the agent is a pharmaceutical agent, it is understood that administration typically would be under the direction of a health care professional capable of identifying a subject who does not yet meet the diagnostic criteria for an ATXN2-associated disorder as being susceptible to developing an ATXN2-associated disorder. Diagnosic criteria for SCAs and ALS, and risk factors for these disorders are provided herein, and include identification of expansions of polyQ in ATXN2, among others. The likelihood of developing, e.g., SCA or ALS, is reduced, for example, when an individual having one or more risk factors for a SCA or for ALS either fails to develop SCA or ALS or develops SCA or ALS with less severity relative to a population having the same risk factors and not receiving treatment as described herein. The failure to develop an ATXN2-associated disorder, e.g., SCA or ALS, or a delay in the time to develop SCA or ALS by months or years is considered effective prevention. Prevention may require administration of more than one dose if the iRNA agent. Provided with appropriate methods to identify subjects at risk to develop any of the ATXN2-associated diseases above, the iRNA agents provided herein can be used as pharmaceutical agents for or in methods of prevention of ATXN2-associated diseases. Risk factors for various ATXN2-associated diseases are discussed herein.

[0296] As used herein, the term “ATXN2-associated disease” or “ATXN2-associated disorder” is understood as SCA (e.g., SCA2), ALS or frontotemporal dementia (FTD), or in certain embodiments, only SCA2. The average onset of SCA2 is in the fourth decade of life, with up to a quarter of patients having onset from 10 to 25 years of age. Clinical features include, but are not limited to, progressive gait ataxia, dysarthria, dysmetria, tremor, abnormal eye movements (slow saccades and supranuclear ophthalmoplegia), and peripheral neuropathy. Signs further include pyramidal tract impairment, autonomic dysfunctions including, but not limited to, postural hypotension, gastrointestinal alterations, sexual dysfunction, and increased salivation, sweating, and lacrimation; and progression through the use of the cane, walker, and wheelchair. Intermediate expansions of polyQ in ATXN2 (29-33 repeats) are associated with amyotrophic lateral sclerosis (ALS).

[0297] As used herein, the term “Spinocerebellar ataxias (SCAs)” refer to diseases or disorders that are caused by, or associated with, a mutation in an SCA gene (e.g., SCA2 is associated with mutations in the ATXN2/SCA2 gene). Spinocerebellar ataxias (SCAs) describe a large group of neurodegenerative disorders that affect movement, with more than 40 autosomal dominant SCAs described. The disorders are characterized by progressive degeneration of the cerebellum and spinal motor neurons; however, both the affected brain regions and the clinical features of SCAs vary depending on the subtype. In all types, ataxia is the key feature, manifested by signs including dysfunction of motor coordination affecting gait, balance, and speech. Signs and symptoms further include, but are not limited to, initially predominantly cerebellar neuronal degeneration, followed by neuronal degeneration in the brainstem, pyramidal and extrapyramidal neurons, oculomotor system, lower motor neurons, and peripheral nerves. Oculomotor symptoms include progressive external ophthalmoplegia (weakness of the eye muscles) and diplopia (double vision), the pyramidal symptoms include spasticity, hyperreflexia, and weakness, extrapyramidal symptoms include dystonia (continuous spasms and muscle contractions), tremors, bradykinesia (slowness of movement) and other symptoms that may resemble Parkinson's disease. Specifically noted symptoms of SCA2 include ataxia (a loss of coordinated movements), parkinsonism, and dementia.

[0298] In one embodiment, an ATXN2-associated disease is “Amyotrphic Lateral Sclerosis” (“ALS”). Amyotrophic lateral sclerosis (ALS) is a progressive nervous system (neurological) disease that destroys nerve cells (particularly motor neurons in the spinal cord and brain) and causes disability. In ALS, motor neurons die (atrophy) over time, leading to muscle weakness, a loss of muscle mass, and an inability to control movement. Most cases of ALS are sporadic, while about 5-10% are inherited. People with sporadic ALS usually first develop features of the condition in their late fifties or early sixties. The earliest symptoms of ALS include muscle twitching, cramping, stiffness, or weakness. Affected individuals may develop slurred speech (dysarthria) and, later, difficulty chewing or swallowing (dysphagia). More generally, symptoms of ALS include, but are not limited to, fasciculations (muscle twitches) in the arm, leg, shoulder, or tongue; muscle cramps; tight and stiff muscles (spasticity); muscle weakness affecting an arm, a leg, neck, or diaphragm; slurred and nasal speech; difficulty chewing or swallowing. Progressive muscle weakness results in inability to stand or walk, get in or out of bed on their own, or use their hands and arms; and eventually results in respiratory system weakness and loss of the ability to breathe independently. Many people with ALS experience malnutrition because of reduced food intake due to dysphagia and an increase in their body's energy demands (metabolism) due to prolonged illness. Muscles become weaker as the disease progresses, and arms and legs begin to look thinner as muscle tissue atrophies. Affected individuals eventually become wheelchair-dependent and increasingly require help with personal care and other activities of daily living. Over time, muscle weakness causes affected individuals to lose the use of their hands and arms. Most people with ALS die from respiratory failure within 2 to 10 years after the signs and symptoms of ALS first appear; however, disease progression varies widely among affected individuals.

[0299] “Therapeutically effective amount,” as used herein, is intended to include the amount of an RNAi agent that, when administered to a subject having an ATXN2-associated disease, is sufficient to effect treatment of the disease (e.g., by diminishing, ameliorating, or maintaining the existing disease or one or more symptoms of disease). The “therapeutically effective amount” may vary depending on the RNAi agent, how the agent is administered, the disease and its severity and the history, age, weight, family history, genetic makeup, the types of preceding or concomitant treatments, if any, and other individual characteristics of the subject to be treated.

[0300] “Prophylactically effective amount,” as used herein, is intended to include the amount of an RNAi agent that, when administered to a subject having an ATXN2-associated disorder, is sufficient to prevent or ameliorate the disease or one or more symptoms of the disease. Ameliorating the disease includes slowing the course of the disease or reducing the severity of later-developing disease. The “prophylactically effective amount” may vary depending on the RNAi agent, how the agent is administered, the degree of risk of disease, and the history, age, weight, family history, genetic makeup, the types of preceding or concomitant treatments, if any, and other individual characteristics of the patient to be treated.

[0301] A “therapeutically-effective amount” or “prophylactically effective amount” also includes an amount of an RNAi agent that produces some desired local or systemic effect at a reasonable benefit/risk ratio applicable to any treatment. An RNAi agent employed in the methods of the present disclosure may be administered in a sufficient amount to produce a reasonable benefit/risk ratio applicable to such treatment.

[0302] The phrase “pharmaceutically acceptable” is employed herein to refer to those compounds, materials, compositions, or dosage forms which are, within the scope of sound medical judgment, suitable for use in contact with the tissues of human subjects and animal subjects without excessive toxicity, irritation, allergic response, or other problem or complication, commensurate with a reasonable benefit/risk ratio.

[0303] The phrase “pharmaceutically-acceptable carrier” as used herein means a pharmaceutically-acceptable material, composition or vehicle, such as a liquid or solid filler, diluent, excipient, manufacturing aid (e.g., lubricant, talc magnesium, calcium or zinc stearate, or steric acid), or solvent encapsulating material, involved in carrying or transporting the subject compound from one organ, or portion of the body, to another organ, or portion of the body. Each carrier must be “acceptable” in the sense of being compatible with the other ingredients of the formulation and not injurious to the subject being treated. Some examples of materials which can serve as pharmaceutically-acceptable carriers include: (1) sugars, such as lactose, glucose and sucrose; (2) starches, such as corn starch and potato starch; (3) cellulose, and its derivatives, such as sodium carboxymethyl cellulose, ethyl cellulose and cellulose acetate; (4) powdered tragacanth; (5) malt; (6) gelatin; (7) lubricating agents, such as magnesium state, sodium lauryl sulfate and talc; (8) excipients, such as cocoa butter and suppository waxes; (9) oils, such as peanut oil, cottonseed oil, safflower oil, sesame oil, olive oil, corn oil and soybean oil; (10) glycols, such as propylene glycol; (11) polyols, such as glycerin, sorbitol, mannitol and polyethylene glycol; (12) esters, such as ethyl oleate and ethyl laurate; (13) agar; (14) buffering agents, such as magnesium hydroxide and aluminum hydroxide; (15) alginic acid; (16) pyrogen-free water; (17) isotonic saline; (18) Ringer's solution; (19) ethyl alcohol; (20) pH buffered solutions; (21) polyesters, polycarbonates or polyanhydrides; (22) bulking agents, such as polypeptides and amino acids (23) serum component, such as serum albumin, HDL and LDL; and (22) other non-toxic compatible substances employed in pharmaceutical formulations.

[0304] The term “sample,” as used herein, includes a collection of similar fluids, cells, or tissues isolated from a subject, as well as fluids, cells, or tissues present within a subject. Examples of biological fluids include blood, serum and serosal fluids, plasma, cerebrospinal fluid, ocular fluids, lymph, urine, saliva, and the like. Tissue samples may include samples from tissues, organs or localized regions. For example, samples may be derived from particular organs, parts of organs, or fluids or cells within those organs. In certain embodiments, samples may be derived from the brain (e.g., whole brain or certain segments of brain, e.g., striatum, or certain types of cells in the brain, such as, e.g., neurons and glial cells (astrocytes, oligodendrocytes, microglial cells)). In other embodiments, a “sample derived from a subject” refers to liver tissue (or subcomponents thereof) derived from the subject. In some embodiments, a “sample derived from a subject” refers to blood drawn from the subject or plasma or serum derived therefrom. In further embodiments, a “sample derived from a subject” refers to brain tissue (or subcomponents thereof) or retinal tissue (or subcomponents thereof) derived from the subject.

[0305] It will be understood that, although the sequences in Tables 2, 5, 9 and 10 are described as modified or conjugated sequences, the RNA of the RNAi agent of the disclosure e.g., a dsRNA of the disclosure, may comprise any one of the sequences set forth in any one of Tables 2, 3, 5, 6, 9 or 10 that is un-modified, un-conjugated, or modified or conjugated differently than described therein. That is, the modified sequences provided in Tables 2, 3, 5, 6, 9 and 10 do not require the L96 ligand, or any ligand. Similarly, the exemplary modified sequences provided in Tables 9 and 10 do not require the exemplary C16 lipophilic ligand shown, or a lipophilic ligand in the position shown. A lipophilic ligand can be included in any of the positions provided in the instant application.

### BRIEF DESCRIPTION OF THE DRAWINGS

[0306] The following detailed description, given by way of example, but not intended to limit the disclosure solely to the specific embodiments described, may best be understood in conjunction with the accompanying drawings, in which:

[0307] FIG. 1 shows a schematic image of modified RNAi agents tested for in vivo hsATXN2 knockdown activity, noting 2′-Fluoro (F), 2′-O-methyl (OMe), 2′-C16, GNA, GalNAc, vinyl phosphonate (VP) and phosphorothioate internucleotide linkages (PS), where present. Respective sense and antisense strand sequences of AD-1040560 (SEQ ID NOs: 1369 and 1426, respectively), AD-1044729 (SEQ ID NOs: 1386 and 1443, respectively), AD-1040736 (SEQ ID NOs: 1371 and 1428, respectively), AD-1041737 (SEQ ID NOs: 1374 and 1431, respectively), AD-1041739 (SEQ ID NOs: 1376 and 1433, respectively), AD-1040559 (SEQ ID NOs: 1368 and 1425, respectively), AD-1040735 (SEQ ID NOs: 1370 and 1427, respectively), AD-1041872 (SEQ ID NOs: 1377 and 1434, respectively), AD-1037453 (SEQ ID NOs: 1359 and 1416, respectively), AD-1039956 (SEQ ID NOs: 1366 and 1423, respectively), AD-1037307 (SEQ ID NOs: 1358 and 1415, respectively), AD-1044730 (SEQ ID NOs: 1387 and 1444, respectively), AD-1069814 (SEQ ID NOs: 1396 and 1453, respectively), AD-1040054 (SEQ ID NOs: 1367 and 1424, respectively), AD-365144 (SEQ ID NOs: 18 and 283, respectively), and AD-64228 (SEQ ID NOs: 6319 and 6321, respectively) are shown.

[0308] FIGS. 2A and 2B show in vivo knockdown of Gaussia luciferase (gLuc) in mice AAV-transduced with a human ATXN2 (hATXN2)-IRES (internal ribosome entry site)-gLuc construct. gLuc in such mice is a secreted luciferase, separated by IRES from hATXN2 on the AAV construct, which therefore serves a quantitative reporter of human ATXN2 specifically in such mice. FIG. 2A shows that between two and four duplexes (AD-1044729.1 and AD-1044730.1, and possibly also AD-1040560.1 and AD-1041737.1) in addition to AD-365144.1 were newly identified as knocking down gLuc (and therefore human ATXN2) by at least 40% in livers of AAV-transduced mice (AAV administered at day 0 by intravenous (IV) injection) at day 14 (D14) post-subcutaneous siRNA injection (at 5 mg/kg). FIG. 2B shows quantitative PCR (qPCR) results in the same mice, which assessed aggregate ATXN2 levels (both endogenous mouse ATXN2 and transfected human ATXN2) in such siRNA-treated mice, as compared to PBS-treated, naïve and AD-64228.41-treated controls.

[0309] FIGS. 3A and 3B show results of in vivo evaluation of the pharamacodynamics (PD) of siRNA-mediated knockdown of endogenous mouse ATXN2. FIG. 3A demonstrates that RT-qPCR evaluation of endogenous mouse ATXN2 (mATXN2) revealed significant variability in certain siRNA-treated groups. FIG. 3B shows the same results as FIG. 3A, except with two “up-regulated groups” removed, which allows for improved discernment of results for siRNAs in which ATXN2-targeting siRNAs were consistently effective ATXN2 inhibitory agents.

[0310] The present invention is further illustrated by the following detailed description.

### DETAILED DESCRIPTION OF THE INVENTION

[0311] The present disclosure provides RNAi compositions, which effect the RNA-induced silencing complex (RISC)-mediated cleavage of RNA transcripts of an ATXN2 gene. The ATXN2 gene may be within a cell, e.g., a cell within a subject, such as a human. The present disclosure also provides methods of using the RNAi compositions of the disclosure for inhibiting the expression of an ATXN2 gene or for treating a subject having a disorder that would benefit from inhibiting or reducing the expression of an ATXN2 gene, e.g., an ATXN2-associated disease, e.g., a spinocerebellar ataxia (SCA), such as spinocerebellar ataxia 2 (SCA2), or Amyotrophic Lateral Sclerosis (ALS).

[0312] The RNAi agents of the disclosure include an RNA strand (the antisense strand) having a region which is about 30 nucleotides or less in length, e.g., 15-30, 15-29, 15-28, 15-27, 15-26, 15-25, 15-24, 15-23, 15-22, 15-21, 15-20, 15-19, 15-18, 15-17, 18-30, 18-29, 18-28, 18-27, 18-26, 18-25, 18-24, 18-23, 18-22, 18-21, 18-20, 19-30, 19-29, 19-28, 19-27, 19-26, 19-25, 19-24, 19-23, 19-22, 19-21, 19-20, 20-30, 20-29, 20-28, 20-27, 20-26, 20-25, 20-24,20-23, 20-22, 20-21, 21-30, 21-29, 21-28, 21-27, 21-26, 21-25, 21-24, 21-23, or 21-22 nucleotides in length, which region is substantially complementary to at least part of an mRNA transcript of an ATXN2 gene. In certain embodiments, the RNAi agents of the disclosure include an RNA strand (the antisense strand) having a region which is about 21-23 nucleotides in length, which region is substantially complementary to at least part of an mRNA transcript of an ATXN2 gene.

[0313] In certain embodiments, the RNAi agents of the disclosure include an RNA strand (the antisense strand) which can include longer lengths, for example up to 66 nucleotides, e.g., 36-66, 26-36, 25-36, 31-60, 22-43, 27-53 nucleotides in length with a region of at least 19 contiguous nucleotides that is substantially complementary to at least a part of an mRNA transcript of an ATXN2 gene. These RNAi agents with the longer length antisense strands optionally include a second RNA strand (the sense strand) of 20-60 nucleotides in length wherein the sense and antisense strands form a duplex of 18-30 contiguous nucleotides.

[0314] The use of these RNAi agents enables the targeted degradation of mRNAs of an ATXN2 gene in mammals. Thus, methods and compositions including these RNAi agents are useful for treating a subject who would benefit by a reduction in the levels or activity of an ATXN2 protein, such as a subject having an ATXN2-associated neurodegenerative disease, e.g. a spinocerebellar ataxia (SCA), such as spinocerebellar ataxia 2 (SCA2), or Amyotrophic Lateral Sclerosis (ALS).

[0315] The following detailed description discloses how to make and use compositions containing RNAi agents to inhibit the expression of an ATXN2 gene, as well as compositions and methods for treating subjects having diseases and disorders that would benefit from inhibition or reduction of the expression of the genes.

### I. RNAi Agents of the Disclosure

[0316] Described herein are RNAi agents which inhibit the expression of an ATXN2 gene. In one embodiment, the RNAi agent includes double stranded ribonucleic acid (dsRNA) molecules for inhibiting the expression of an ATXN2 gene in a cell, such as a cell within a subject, e.g., a mammal, such as a human having an ATXN2-associated neurodegenerative disease, e.g., a spinocerebellar ataxia (SCA), such as spinocerebellar ataxia 2 (SCA2), or Amyotrophic Lateral Sclerosis (ALS). The dsRNA includes an antisense strand having a region of complementarity which is complementary to at least a part of an mRNA formed in the expression of an ATXN2 gene. In embodiments, the region of complementarity is about 15-30 nucleotides or less in length. Upon contact with a cell expressing the ATXN2 gene, the RNAi agent inhibits the expression of the ATXN2 gene (e.g., a human gene, a primate gene, a non-primate gene) by at least 50% as assayed by, for example, a PCR or branched DNA (bDNA)-based method, or by a protein-based method, such as by immunofluorescence analysis, using, for example, western blotting or flowcytometric techniques.

[0317] A dsRNA includes two RNA strands that are complementary and hybridize to form a duplex structure under conditions in which the dsRNA will be used. One strand of a dsRNA (the antisense strand) includes a region of complementarity that is substantially complementary, and generally fully complementary, to a target sequence. The target sequence can be derived from the sequence of an mRNA formed during the expression of an ATXN2 gene. The other strand (the sense strand) includes a region that is complementary to the antisense strand, such that the two strands hybridize and form a duplex structure when combined under suitable conditions. As described elsewhere herein and as known in the art, the complementary sequences of a dsRNA can also be contained as self-complementary regions of a single nucleic acid molecule, as opposed to being on separate oligonucleotides.

[0318] Generally, the duplex structure is 15 to 30 base pairs in length, e.g., 15-29, 15-28, 15-27, 15-26, 15-25, 15-24, 15-23, 15-22, 15-21, 15-20, 15-19, 15-18, 15-17, 18-30, 18-29, 18-28, 18-27, 18-26, 18-25, 18-24, 18-23, 18-22, 18-21, 18-20, 19-30, 19-29, 19-28, 19-27, 19-26, 19-25, 19-24, 19-23, 19-22, 19-21, 19-20, 20-30, 20-29, 20-28, 20-27, 20-26, 20-25, 20-24,20-23, 20-22, 20-21, 21-30, 21-29, 21-28, 21-27, 21-26, 21-25, 21-24, 21-23, or 21-22 base pairs in length. In certain preferred embodiments, the duplex structure is 18 to 25 base pairs in length, e.g., 18-25, 18-24, 18-23, 18-22, 18-21, 18-20, 19-25, 19-24, 19-23, 19-22, 19-21, 19-20, 20-25, 20-24,20-23, 20-22, 20-21, 21-25, 21-24, 21-23, 21-22, 22-25, 22-24, 22-23, 23-25, 23-24 or 24-25 base pairs in length, for example, 19-21 basepairs in length. Ranges and lengths intermediate to the above recited ranges and lengths are also contemplated to be part of the disclosure.

[0319] Similarly, the region of complementarity to the target sequence is 15 to 30 nucleotides in length, e.g., 15-29, 15-28, 15-27, 15-26, 15-25, 15-24, 15-23, 15-22, 15-21, 15-20, 15-19, 15-18, 15-17, 18-30, 18-29, 18-28, 18-27, 18-26, 18-25, 18-24, 18-23, 18-22, 18-21, 18-20, 19-30, 19-29, 19-28, 19-27, 19-26, 19-25, 19-24, 19-23, 19-22, 19-21, 19-20, 20-30, 20-29, 20-28, 20-27, 20-26, 20-25, 20-24,20-23, 20-22, 20-21, 21-30, 21-29, 21-28, 21-27, 21-26, 21-25, 21-24, 21-23, or 21-22 nucleotides in length, for example 19-23 nucleotides in length or 21-23 nucleotides in length. Ranges and lengths intermediate to the above recited ranges and lengths are also contemplated to be part of the disclosure.

[0320] In some embodiments, the dsRNA is 15 to 23 nucleotides in length, or 24 to 30 nucleotides in length (optionally, 25 to 30 nucleotides in length). In general, the dsRNA can be long enough to serve as a substrate for the Dicer enzyme. For example, it is well known in the art that dsRNAs longer than about 21-23 nucleotides can serve as substrates for Dicer. As the ordinarily skilled person will also recognize, the region of an RNA targeted for cleavage will most often be part of a larger RNA molecule, often an mRNA molecule. Where relevant, a “part” of an mRNA target is a contiguous sequence of an mRNA target of sufficient length to allow it to be a substrate for RNAi-directed cleavage (i.e., cleavage through a RISC pathway).

[0321] One of skill in the art will also recognize that the duplex region is a primary functional portion of a dsRNA, e.g., a duplex region of about 15 to 36 base pairs, e.g., 15-36, 15-35, 15-34, 15-33, 15-32, 15-31, 15-30, 15-29, 15-28, 15-27, 15-26, 15-25, 15-24, 15-23, 15-22, 15-21, 15-20, 15-19, 15-18, 15-17, 18-30, 18-29, 18-28, 18-27, 18-26, 18-25, 18-24, 18-23, 18-22, 18-21, 18-20, 19-30, 19-29, 19-28, 19-27, 19-26, 19-25, 19-24, 19-23, 19-22, 19-21, 19-20, 20-30, 20-29, 20-28, 20-27, 20-26, 20-25, 20-24,20-23, 20-22, 20-21, 21-30, 21-29, 21-28, 21-27, 21-26, 21-25, 21-24, 21-23, or 21-22 base pairs, for example, 19-21 base pairs. Thus, in one embodiment, to the extent that it becomes processed to a functional duplex, of e.g., 15-30 base pairs, that targets a desired RNA for cleavage, an RNA molecule or complex of RNA molecules having a duplex region greater than 30 base pairs is a dsRNA. Thus, an ordinarily skilled artisan will recognize that in one embodiment, a miRNA is a dsRNA. In another embodiment, a dsRNA is not a naturally occurring miRNA. In another embodiment, an RNAi agent useful to target ATXN2 expression is not generated in the target cell by cleavage of a larger dsRNA.

[0322] A dsRNA as described herein can further include one or more single-stranded nucleotide overhangs e.g., 1, 2, 3, or 4 nucleotides. A nucleotide overhang can comprise or consist of a nucleotide/nucleoside analog, including a deoxynucleotide/nucleoside. The overhang(s) can be on the sense strand, the antisense strand or any combination thereof. Furthermore, the nucleotide(s) of an overhang can be present on the 5′-end, 3′-end or both ends of either an antisense or sense strand of a dsRNA. In certain embodiments, longer, extended overhangs are possible.

[0323] A dsRNA can be synthesized by standard methods known in the art as further discussed below, e.g., by use of an automated DNA synthesizer, such as are commercially available from, for example, Biosearch, Applied Biosystems, Inc.

[0324] iRNA compounds of the disclosure may be prepared using a two-step procedure. First, the individual strands of the double stranded RNA molecule are prepared separately. Then, the component strands are annealed. The individual strands of the siRNA compound can be prepared using solution-phase or solid-phase organic synthesis or both. Organic synthesis offers the advantage that the oligonucleotide strands comprising unnatural or modified nucleotides can be easily prepared. Single-stranded oligonucleotides of the disclosure can be prepared using solution-phase or solid-phase organic synthesis or both.

[0325] An siRNA can be produced, e.g., in bulk, by a variety of methods. Exemplary methods include: organic synthesis and RNA cleavage, e.g., in vitro cleavage.

[0326] An siRNA can be made by separately synthesizing a single stranded RNA molecule, or each respective strand of a double-stranded RNA molecule, after which the component strands can then be annealed.

[0327] A large bioreactor, e.g., the OligoPilot II from Pharmacia Biotec AB (Uppsala Sweden), can be used to produce a large amount of a particular RNA strand for a given siRNA. The OligoPilotII reactor can efficiently couple a nucleotide using only a 1.5 molar excess of a phosphoramidite nucleotide. To make an RNA strand, ribonucleotides amidites are used. Standard cycles of monomer addition can be used to synthesize the 21 to 23 nucleotide strand for the siRNA. Typically, the two complementary strands are produced separately and then annealed, e.g., after release from the solid support and deprotection.

[0328] Organic synthesis can be used to produce a discrete siRNA species. The complementary of the species to an ATXN2 gene can be precisely specified. For example, the species may be complementary to a region that includes a polymorphism, e.g., a single nucleotide polymorphism. Further the location of the polymorphism can be precisely defined. In some embodiments, the polymorphism is located in an internal region, e.g., at least 4, 5, 7, or 9 nucleotides from one or both of the termini.

[0329] In one embodiment, RNA generated is carefully purified to remove ends. iRNA is cleaved in vitro into siRNAs, for example, using a Dicer or comparable RNAse III-based activity. For example, the dsiRNA can be incubated in an in vitro extract from Drosophila or using purified components, e.g., a purified RNAse or RISC (RNA-induced silencing complex). See, e.g., Ketting et al. Genes Dev 2001 Oct. 15; 15(20): 2654-9 and Hammond Science 2001 Aug. 10; 293(5532): 1146-50.

[0330] dsiRNA cleavage generally produces a plurality of siRNA species, each being a particular 21 to 23 nt fragment of a source dsiRNA molecule. For example, siRNAs that include sequences complementary to overlapping regions and adjacent regions of a source dsiRNA molecule may be present.

[0331] Regardless of the method of synthesis, the siRNA preparation can be prepared in a solution (e.g., an aqueous or organic solution) that is appropriate for formulation. For example, the siRNA preparation can be precipitated and redissolved in pure double-distilled water, and lyophilized. The dried siRNA can then be resuspended in a solution appropriate for the intended formulation process.

[0332] In one aspect, a dsRNA of the disclosure includes at least two nucleotide sequences, a sense sequence and an antisense sequence. The sense strand sequence for ATXN2 may be selected from the group of sequences provided in any one of Tables 2, 3, 5, 6, 9 or 10, and the corresponding nucleotide sequence of the antisense strand of the sense strand may be selected from the group of sequences of any one of Tables 2, 3, 5, 6, 9 or 10. In this aspect, one of the two sequences is complementary to the other of the two sequences, with one of the sequences being substantially complementary to a sequence of an mRNA generated in the expression of an ATXN2 gene. As such, in this aspect, a dsRNA will include two oligonucleotides, where one oligonucleotide is described as the sense strand (passenger strand) in any one of Tables 2, 3, 5, 6, 9 or 10, and the second oligonucleotide is described as the corresponding antisense strand (guide strand) of the sense strand in any one of Tables 2, 3, 5, 6, 9 or 10 for ATXN2.

[0333] In one embodiment, the substantially complementary sequences of the dsRNA are contained on separate oligonucleotides. In another embodiment, the substantially complementary sequences of the dsRNA are contained on a single oligonucleotide.

[0334] It will be understood that, although the sequences provided herein are described as modified or conjugated sequences, the RNA of the RNAi agent of the disclosure e.g., a dsRNA of the disclosure, may comprise any one of the sequences set forth in any one of Tables 2, 3, 5, 6, 9 or 10 that is un-modified, un-conjugated, or modified or conjugated differently than described therein. One or more lipophilic ligands or one or more GalNAc ligands can be included in any of the positions of the RNAi agents provided in the instant application.

[0335] The skilled person is well aware that dsRNAs having a duplex structure of about 20 to 23 base pairs, e.g., 21, base pairs have been hailed as particularly effective in inducing RNA interference (Elbashir et al., (2001) EMBO J., 20: 6877-6888). However, others have found that shorter or longer RNA duplex structures can also be effective (Chu and Rana (2007) RNA 14: 1714-1719; Kim et al. (2005) Nat Biotech 23: 222-226). In the embodiments described above, by virtue of the nature of the oligonucleotide sequences provided herein, dsRNAs described herein can include at least one strand of a length of minimally 21 nucleotides. It can be reasonably expected that shorter duplexes minus only a few nucleotides on one or both ends can be similarly effective as compared to the dsRNAs described above. Hence, dsRNAs having a sequence of at least 15, 16, 17, 18, 19, 20, or more contiguous nucleotides derived from one of the sequences provided herein, and differing in their ability to inhibit the expression of an ATXN2 gene by not more than 10, 15, 20, 25, or 30% inhibition from a dsRNA comprising the full sequence using the in vitro assay with Be(2)-C cells and a 10 nM concentration of the RNA agent and the PCR assay as provided in the examples herein, are contemplated to be within the scope of the present disclosure.

[0336] One benchmark assay for inhibition of ATXN2 involves contacting human Be(2)-C cells with a dsRNA agent as disclosed herein, where sufficient or effective ATXN2 inhibition is identified if at least 5% reduction, at least 10% reduction, at least 15% reduction, at least 20% reduction, at least 25% reduction, at least 30% reduction, at least 35% reduction, at least 40% reduction, at least 45% reduction, at least 50% reduction, at least 55% reduction, at least 60% reduction, at least 65% reduction, at least 70% reduction, at least 75% reduction, at least 80% reduction, at least 85% reduction, at least 90% reduction, at least 95% reduction, at least 97% reduction, at least 98% reduction, at least 99% reduction, or more of ATXN2 transcript or protein is observed in contacted cells, as compared to an appropriate control (e.g., cells not contacted with ATXN2-targeting dsRNA). Optionally, a dsRNA agent of the disclosure is administered at 10 nM concentration, and the PCR assay is performed as provided in the examples herein (e.g., Example 2 below).

[0337] In addition, the RNAs described herein identify a site(s) in an ATXN2 transcript that is susceptible to RISC-mediated cleavage. As such, the present disclosure further features RNAi agents that target within this site(s). As used herein, an RNAi agent is said to target within a particular site of an RNA transcript if the RNAi agent promotes cleavage of the transcript anywhere within that particular site. Such an RNAi agent will generally include at least about 15 contiguous nucleotides, optionally at least 19 nucleotides, from one of the sequences provided herein coupled to additional nucleotide sequences taken from the region contiguous to the selected sequence in an ATXN2 gene.

[0338] An RNAi agent as described herein can contain one or more mismatches to the target sequence. In one embodiment, an RNAi agent as described herein contains no more than 3 mismatches (i.e., 3, 2, 1, or 0 mismatches). In one embodiment, an RNAi agent as described herein contains no more than 2 mismatches. In one embodiment, an RNAi agent as described herein contains no more than 1 mismatch. In one embodiment, an RNAi agent as described herein contains 0 mismatches. In certain embodiments, if the antisense strand of the RNAi agent contains mismatches to the target sequence, the mismatch can optionally be restricted to be within the last 5 nucleotides from either the 5′- or 3′-end of the region of complementarity. For example, in such embodiments, for a 23 nucleotide RNAi agent, the strand which is complementary to a region of an ATXN2 gene generally does not contain any mismatch within the central 13 nucleotides. The methods described herein or methods known in the art can be used to determine whether an RNAi agent containing a mismatch to a target sequence is effective in inhibiting the expression of an ATXN2 gene. Consideration of the efficacy of RNAi agents with mismatches in inhibiting expression of an ATXN2 gene is important, especially if the particular region of complementarity in an ATXN2 gene is known to have polymorphic sequence variation within the population.

### II. Modified RNAi Agents of the Disclosure

[0339] In one embodiment, the RNA of the RNAi agent of the disclosure e.g., a dsRNA, is un-modified, and does not comprise, e.g., chemical modifications or conjugations known in the art and described herein. In preferred embodiments, the RNA of an RNAi agent of the disclosure, e.g., a dsRNA, is chemically modified to enhance stability or other beneficial characteristics. In certain embodiments of the disclosure, substantially all of the nucleotides of an RNAi agent of the disclosure are modified. In other embodiments of the disclosure, all of the nucleotides of an RNAi agent of the disclosure are modified. RNAi agents of the disclosure in which “substantially all of the nucleotides are modified” are largely but not wholly modified and can include not more than 5, 4, 3, 2, or 1 unmodified nucleotides. In still other embodiments of the disclosure, RNAi agents of the disclosure can include not more than 5, 4, 3, 2 or 1 modified nucleotides.

[0340] The nucleic acids featured in the disclosure can be synthesized or modified by methods well established in the art, such as those described in “Current protocols in nucleic acid chemistry,” Beaucage, S. L. et al. (Edrs.), John Wiley & Sons, Inc., New York, NY, USA, which is hereby incorporated herein by reference. Modifications include, for example, end modifications, e.g., 5′-end modifications (phosphorylation, conjugation, inverted linkages) or 3′-end modifications (conjugation, DNA nucleotides, inverted linkages, etc.); base modifications, e.g., replacement with stabilizing bases, destabilizing bases, or bases that base pair with an expanded repertoire of partners, removal of bases (abasic nucleotides), or conjugated bases; sugar modifications (e.g., at the 2′-position or 4′-position) or replacement of the sugar; or backbone modifications, including modification or replacement of the phosphodiester linkages. Specific examples of RNAi agents useful in the embodiments described herein include, but are not limited to, RNAs containing modified backbones or no natural internucleoside linkages. RNAs having modified backbones include, among others, those that do not have a phosphorus atom in the backbone. For the purposes of this specification, and as sometimes referenced in the art, modified RNAs that do not have a phosphorus atom in their internucleoside backbone can also be considered to be oligonucleosides. In some embodiments, a modified RNAi agent will have a phosphorus atom in its internucleoside backbone.

[0341] Modified RNA backbones include, for example, phosphorothioates, chiral phosphorothioates, phosphorodithioates, phosphotriesters, aminoalkylphosphotriesters, methyl and other alkyl phosphonates including 3′-alkylene phosphonates and chiral phosphonates, phosphinates, phosphoramidates including 3′-amino phosphoramidate and aminoalkylphosphoramidates, thionophosphoramidates, thionoalkylphosphonates, thionoalkylphosphotriesters, and boranophosphates having normal 3′-5′ linkages, 2′-5′-linked analogs of these, and those having inverted polarity wherein the adjacent pairs of nucleoside units are linked 3′-5′ to 5′-3′ or 2′-5′ to 5′-2′. Various salts, e.g., sodium salts, mixed salts and free acid forms are also included.

[0342] Representative U.S. patents that teach the preparation of the above phosphorus-containing linkages include, but are not limited to, U.S. Pat. Nos. 3,687,808; 4,469,863; 4,476,301; 5,023,243; 5,177,195; 5,188,897; 5,264,423; 5,276,019; 5,278,302; 5,286,717; 5,321,131; 5,399,676; 5,405,939; 5,453,496; 5,455,233; 5,466,677; 5,476,925; 5,519,126; 5,536,821; 5,541,316; 5,550,111; 5,563,253; 5,571,799; 5,587,361; 5,625,050; 6,028,188; 6,124,445; 6,160,109; 6,169,170; 6,172,209; 6,239,265; 6,277,603; 6,326,199; 6,346,614; 6,444,423; 6,531,590; 6,534,639; 6,608,035; 6,683,167; 6,858,715; 6,867,294; 6,878,805; 7,015,315; 7,041,816; 7,273,933; 7,321,029; and U.S. Pat. RE39464, the entire contents of each of which are hereby incorporated herein by reference.

[0343] Modified RNA backbones that do not include a phosphorus atom therein have backbones that are formed by short chain alkyl or cycloalkyl internucleoside linkages, mixed heteroatoms and alkyl or cycloalkyl internucleoside linkages, or one or more short chain heteroatomic or heterocyclic internucleoside linkages. These include those having morpholino linkages (formed in part from the sugar portion of a nucleoside); siloxane backbones; sulfide, sulfoxide and sulfone backbones; formacetyl and thioformacetyl backbones; methylene formacetyl and thioformacetyl backbones; alkene containing backbones; sulfamate backbones; methyleneimino and methylenehydrazino backbones; sulfonate and sulfonamide backbones; amide backbones; and others having mixed N, O, S and CH₂ component parts.

[0344] Representative U.S. patents that teach the preparation of the above oligonucleosides include, but are not limited to, U.S. Pat. Nos. 5,034,506; 5,166,315; 5,185,444; 5,214,134; 5,216,141; 5,235,033; 5,64,562; 5,264,564; 5,405,938; 5,434,257; 5,466,677; 5,470,967; 5,489,677; 5,541,307; 5,561,225; 5,596,086; 5,602,240; 5,608,046; 5,610,289; 5,618,704; 5,623,070; 5,663,312; 5,633,360; 5,677,437; and, 5,677,439, the entire contents of each of which are hereby incorporated herein by reference.

[0345] In other embodiments, suitable RNA mimetics are contemplated for use in RNAi agents, in which both the sugar and the internucleoside linkage, i.e., the backbone, of the nucleotide units are replaced with novel groups. The base units are maintained for hybridization with an appropriate nucleic acid target compound. One such oligomeric compound, an RNA mimetic that has been shown to have excellent hybridization properties, is referred to as a peptide nucleic acid (PNA). In PNA compounds, the sugar backbone of an RNA is replaced with an amide containing backbone, in particular an aminoethylglycine backbone. The nucleobases are retained and are bound directly or indirectly to aza nitrogen atoms of the amide portion of the backbone. Representative U.S. patents that teach the preparation of PNA compounds include, but are not limited to, U.S. Pat. Nos. 5,539,082; 5,714,331; and 5,719,262, the entire contents of each of which are hereby incorporated herein by reference. Additional PNA compounds suitable for use in the RNAi agents of the disclosure are described in, for example, in Nielsen et al., Science, 1991, 254, 1497-1500.

[0346] Some embodiments featured in the disclosure include RNAs with phosphorothioate backbones and oligonucleosides with heteroatom backbones, and in particular —CH₂—NH—CH₂—, —CH₂—N(CH₃)—O—CH₂—[known as a methylene (methylimino) or MMI backbone], —CH₂—O—N(CH₃)—CH₂—, —CH₂—N(CH₃)—N(CH₃)—CH₂—and —N(CH₃)—CH₂—CH₂—[wherein the native phosphodiester backbone is represented as —O—P—O—CH₂—] of the above-referenced U.S. Pat. No. 5,489,677, and the amide backbones of the above-referenced U.S. Pat. No. 5,602,240. In some embodiments, the RNAs featured herein have morpholino backbone structures of the above-referenced U.S. Pat. No. 5,034,506.

[0347] Modified RNAs can also contain one or more substituted sugar moieties. The RNAi agents, e.g., dsRNAs, featured herein can include one of the following at the 2′-position: OH; F; O—, S—, or N-alkyl; O—, S—, or N-alkenyl; O—, S- or N-alkynyl; or O-alkyl-O-alkyl, wherein the alkyl, alkenyl and alkynyl can be substituted or unsubstituted C₁ to C₁₀ alkyl or C2 to C₁₀ alkenyl and alkynyl. Exemplary suitable modifications include 0[(CH₂)ₙO]ₘCH₃, O(CH₂)·ₙOCH₃, O(CH₂)ₙNH₂, O(CH₂)ₙCH₃, O(CH₂)ₙONH₂, and O(CH₂)ₙON[(CH₂)ₙCH₃)]2, where n and m are from 1 to about 10. In other embodiments, dsRNAs include one of the following at the 2′ position: C₁ to C₁₀ lower alkyl, substituted lower alkyl, alkaryl, aralkyl, O-alkaryl or O-aralkyl, SH, SCH₃, OCN, Cl, Br, CN, CF₃, OCF₃, SOCH₃, SO₂CH₃, ONO₂, NO₂, N₃, NH₂, heterocycloalkyl, heterocycloalkaryl, aminoalkylamino, polyalkylamino, substituted silyl, an RNA cleaving group, a reporter group, an intercalator, a group for improving the pharmacokinetic properties of an RNAi agent, or a group for improving the pharmacodynamic properties of an RNAi agent, and other substituents having similar properties. In some embodiments, the modification includes a 2′-methoxyethoxy (2′-O—CH₂CH₂OCH₃, also known as 2′-O-(2-methoxyethyl) or 2′-MOE) (Martin et al., Helv. Chim. Acta, 1995, 78: 486-504) i.e., an alkoxy-alkoxy group. Another exemplary modification is 2′-dimethylaminooxyethoxy, i.e., a O(CH₂)₂₀N(CH₃)₂ group, also known as 2′-DMAOE, as described in examples herein below, and 2′-dimethylaminoethoxyethoxy (also known in the art as 2′-O-dimethylaminoethoxyethyl or 2′-DMAEOE), i.e., 2′-O—CH₂—O—CH₂—N(CH₂)₂. Further exemplary modifications include: 5′-Me-2′-F nucleotides, 5′-Me-2′-OMe nucleotides, 5′-Me-2′-deoxynucleotides, (both R and S isomers in these three families); 2′-alkoxyalkyl; and 2′-NMA (N-methylacetamide).

[0348] Other modifications include 2′-methoxy (2′-OCH₃), 2′-aminopropoxy (2′-OCH₂CH₂CH₂NH₂), 2′-O-hexadecyl, and 2′-fluoro (2′-F). Similar modifications can also be made at other positions on the RNA of an RNAi agent, particularly the 3′ position of the sugar on the 3′ terminal nucleotide or in 2′-5′ linked dsRNAs and the 5′ position of 5′ terminal nucleotide. RNAi agents can also have sugar mimetics such as cyclobutyl moieties in place of the pentofuranosyl sugar. Representative U.S. patents that teach the preparation of such modified sugar structures include, but are not limited to, U.S. Pat. Nos. 4,981,957; 5,118,800; 5,319,080; 5,359,044; 5,393,878; 5,446,137; 5,466,786; 5,514,785; 5,519,134; 5,567,811; 5,576,427; 5,591,722; 5,597,909; 5,610,300; 5,627,053; 5,639,873; 5,646,265; 5,658,873; 5,670,633; and 5,700,920, certain of which are commonly owned with the instant application. The entire contents of each of the foregoing are hereby incorporated herein by reference.

[0349] An RNAi agent of the disclosure can also include nucleobase (often referred to in the art simply as “base”) modifications or substitutions. As used herein, “unmodified” or “natural” nucleobases include the purine bases adenine (A) and guanine (G), and the pyrimidine bases thymine (T), cytosine (C) and uracil (U). Modified nucleobases include other synthetic and natural nucleobases such as 5-methylcytosine (5-me-C), 5-hydroxymethyl cytosine, xanthine, hypoxanthine, 2-aminoadenine, 6-methyl and other alkyl derivatives of adenine and guanine, 2-propyl and other alkyl derivatives of adenine and guanine, 2-thiouracil, 2-thiothymine and 2-thiocytosine, 5-halouracil and cytosine, 5-propynyl uracil and cytosine, 6-azo uracil, cytosine and thymine, 5-uracil (pseudouracil), 4-thiouracil, 8-halo, 8-amino, 8-thiol, 8-thioalkyl, 8-hydroxyl anal other 8-substituted adenines and guanines, 5-halo, particularly 5-bromo, 5-trifluoromethyl and other 5-substituted uracils and cytosines, 7-methylguanine and 7-methyladenine, 8-azaguanine and 8-azaadenine, 7-deazaguanine and 7-daazaadenine and 3-deazaguanine and 3-deazaadenine. Further nucleobases include those disclosed in U.S. Pat. No. 3,687,808, those disclosed in Modified Nucleosides in Biochemistry, Biotechnology and Medicine, Herdewijn, P. ed. Wiley-VCH, 2008; those disclosed in The Concise Encyclopedia Of Polymer Science And Engineering, pages 858-859, Kroschwitz, J. L, ed. John Wiley & Sons, 1990, these disclosed by Englisch et al., (1991) Angewandte Chemie, International Edition, 30: 613, and those disclosed by Sanghvi, Y S., Chapter 15, dsRNA Research and Applications, pages 289-302, Crooke, S. T. and Lebleu, B., Ed., CRC Press, 1993. Certain of these nucleobases are particularly useful for increasing the binding affinity of the oligomeric compounds featured in the disclosure. These include 5-substituted pyrimidines, 6-azapyrimidines and N-2, N-6 and 0-6 substituted purines, including 2-aminopropyladenine, 5-propynyluracil and 5-propynylcytosine. 5-methylcytosine substitutions have been shown to increase nucleic acid duplex stability by 0.6-1.2° C. (Sanghvi, Y. S., Crooke, S. T. and Lebleu, B., Eds., dsRNA Research and Applications, CRC Press, Boca Raton, 1993, pp. 276-278) and are exemplary base substitutions, even more particularly when combined with 2′-O-methoxyethyl sugar modifications.

[0350] Representative U.S. patents that teach the preparation of certain of the above noted modified nucleobases as well as other modified nucleobases include, but are not limited to, the above noted U.S. Pat. Nos. 3,687,808, 4,845,205; 5,130,30; 5,134,066; 5,175,273; 5,367,066; 5,432,272; 5,457,187; 5,459,255; 5,484,908; 5,502,177; 5,525,711; 5,552,540; 5,587,469; 5,594,121, 5,596,091; 5,614,617; 5,681,941; 5,750,692; 6,015,886; 6,147,200; 6,166,197; 6,222,025; 6,235,887; 6,380,368; 6,528,640; 6,639,062; 6,617,438; 7,045,610; 7,427,672; and 7,495,088, the entire contents of each of which are hereby incorporated herein by reference.

[0351] An RNAi agent of the disclosure can also be modified to include one or more locked nucleic acids (LNA). A locked nucleic acid is a nucleotide having a modified ribose moiety in which the ribose moiety comprises an extra bridge connecting the 2′ and 4′ carbons. This structure effectively “locks” the ribose in the 3′-endo structural conformation. The addition of locked nucleic acids to siRNAs has been shown to increase siRNA stability in serum, and to reduce off-target effects (Elmen, J. et al., (2005) Nucleic Acids Research 33(1): 439-447; Mook, O R. et al., (2007) Mol Canc Ther 6(3): 833-843; Grunweller, A. et al., (2003) Nucleic Acids Research 31(12): 3185-3193).

[0352] An RNAi agent of the disclosure can also be modified to include one or more bicyclic sugar moities. A “bicyclic sugar” is a furanosyl ring modified by the bridging of two atoms. A “bicyclic nucleoside” (“BNA”) is a nucleoside having a sugar moiety comprising a bridge connecting two carbon atoms of the sugar ring, thereby forming a bicyclic ring system. In certain embodiments, the bridge connects the 4′-carbon and the 2′-carbon of the sugar ring. Thus, in some embodiments an agent of the disclosure may include one or more locked nucleic acids (LNA). A locked nucleic acid is a nucleotide having a modified ribose moiety in which the ribose moiety comprises an extra bridge connecting the 2′ and 4′ carbons. In other words, an LNA is a nucleotide comprising a bicyclic sugar moiety comprising a 4′-CH2-O-2′ bridge. This structure effectively “locks” the ribose in the 3′-endo structural conformation. The addition of locked nucleic acids to siRNAs has been shown to increase siRNA stability in serum, and to reduce off-target effects (Elmen, J. et al., (2005) Nucleic Acids Research 33(1): 439-447; Mook, O R. et al., (2007) Mol Canc Ther 6(3): 833-843; Grunweller, A. et al., (2003) Nucleic Acids Research 31(12): 3185-3193). Examples of bicyclic nucleosides for use in the polynucleotides of the disclosure include without limitation nucleosides comprising a bridge between the 4′ and the 2′ ribosyl ring atoms. In certain embodiments, the antisense polynucleotide agents of the disclosure include one or more bicyclic nucleosides comprising a 4′ to 2′ bridge. Examples of such 4′ to 2′ bridged bicyclic nucleosides, include but are not limited to 4′-(CH2)-O-2′ (LNA); 4′-(CH2)S-2′; 4′-(CH2)₂-O-2′ (ENA); 4′-CH(CH3) 0-2′ (also referred to as “constrained ethyl” or “cEt”) and 4′-CH(CH2OCH3) 0-2′ (and analogs thereof, see, e.g., U.S. Pat. No. 7,399,845); 4′-C(CH3)(CH3) 0-2′ (and analogs thereof; see e.g., U.S. Pat. No. 8,278,283); 4′-CH2 —N(OCH3)-2′ (and analogs thereof; see e.g., U.S. Pat. No. 8,278,425); 4′-CH2-O—N(CH3)-2′ (see, e.g., U.S. Patent Publication No. 2004/0171570); 4′-CH2-N(R)—O-2′, wherein R is H, C1-C12 alkyl, or a protecting group (see, e.g., U.S. Pat. No. 7,427,672); 4′-CH2-C(H)(CH3)-2′ (see, e.g., Chattopadhyaya et al., J. Org. Chem., 2009, 74, 118-134); and 4′-CH2-C(═CH2)-2′ (and analogs thereof, see, e.g., U.S. Pat. No. 8,278,426). The entire contents of each of the foregoing are hereby incorporated herein by reference.

[0353] Additional representative US Patents and US Patent Publications that teach the preparation of locked nucleic acid nucleotides include, but are not limited to, the following: U.S. Pat. Nos. 6,268,490; 6,525,191; 6,670,461; 6,770,748; 6,794,499; 6,998,484; 7,053,207; 7,034,133; 7,084,125; 7,399,845; 7,427,672; 7,569,686; 7,741,457; 8,022,193; 8,030,467; 8,278,425; 8,278,426; 8,278,283; US 2008/0039618; and US 2009/0012281, the entire contents of each of which are hereby incorporated herein by reference.

[0354] Any of the foregoing bicyclic nucleosides can be prepared having one or more stereochemical sugar configurations including for example α-L-ribofuranose and j-D-ribofuranose (see WO 99/14226).

[0355] An RNAi agent of the disclosure can also be modified to include one or more constrained ethyl nucleotides. As used herein, a “constrained ethyl nucleotide” or “cEt” is a locked nucleic acid comprising a bicyclic sugar moiety comprising a 4′-CH(CH3)-O-2′ bridge. In one embodiment, a constrained ethyl nucleotide is in the S conformation referred to herein as “S-cEt.”

[0356] An RNAi agent of the disclosure may also include one or more “conformationally restricted nucleotides” (“CRN”). CRN are nucleotide analogs with a linker connecting the C2′ and C4′ carbons of ribose or the C3′ and C5′ carbons of ribose. CRN lock the ribose ring into a stable conformation and increase the hybridization affinity to mRNA. The linker is of sufficient length to place the oxygen in an optimal position for stability and affinity resulting in less ribose ring puckering.

[0357] Representative publications that teach the preparation of certain of the above noted CRN include, but are not limited to, US 2013/0190383; and WO 2013/036868, the entire contents of each of which are hereby incorporated herein by reference.

[0358] In some embodiments, an RNAi agent of the disclosure comprises one or more monomers that are UNA (unlocked nucleic acid) nucleotides. UNA is unlocked acyclic nucleic acid, wherein any of the bonds of the sugar has been removed, forming an unlocked “sugar” residue. In one example, UNA also encompasses monomer with bonds between C1′-C4′ have been removed (i.e. the covalent carbon-oxygen-carbon bond between the C1′ and C4′ carbons). In another example, the C2′-C3′ bond (i.e. the covalent carbon-carbon bond between the C2′ and C3′ carbons) of the sugar has been removed (see Nuc. Acids Symp. Series, 52, 133-134 (2008) and Fluiter et al., Mol. Biosyst., 2009, 10, 1039 hereby incorporated by reference).

[0359] Representative U.S. publications that teach the preparation of UNA include, but are not limited to, U.S. Pat. No. 8,314,227; and US Patent Publication Nos. 2013/0096289; 2013/0011922; and 2011/0313020, the entire contents of each of which are hereby incorporated herein by reference.

[0360] Potentially stabilizing modifications to the ends of RNA molecules can include N-(acetylaminocaproyl)-4-hydroxyprolinol (Hyp-C6-NHAc), N-(caproyl-4-hydroxyprolinol (Hyp-C6), N-(acetyl-4-hydroxyprolinol (Hyp-NHAc), thymidine-2′-O-deoxythymidine (ether), N-(aminocaproyl)-4-hydroxyprolinol (Hyp-C6-amino), 2-docosanoyl-uridine-3″-phosphate, inverted base dT(idT) and others. Disclosure of this modification can be found in WO 2011/005861.

[0361] Other modifications of an RNAi agent of the disclosure include a 5′ phosphate or 5′ phosphate mimic, e.g., a 5′-terminal phosphate or phosphate mimic on the antisense strand of an RNAi agent. Suitable phosphate mimics are disclosed in, for example US 2012/0157511, the entire contents of which are incorporated herein by reference.

### A. Modified RNAi agents Comprising Motifs of the Disclosure

[0362] In certain aspects of the disclosure, the double-stranded RNAi agents of the disclosure include agents with chemical modifications as disclosed, for example, in WO 2013/075035, the entire contents of which are incorporated herein by reference. As shown herein and in WO 2013/075035, a superior result may be obtained by introducing one or more motifs of three identical modifications on three consecutive nucleotides into a sense strand or antisense strand of an RNAi agent, particularly at or near the cleavage site. In some embodiments, the sense strand and antisense strand of the RNAi agent may otherwise be completely modified. The introduction of these motifs interrupts the modification pattern, if present, of the sense or antisense strand. The RNAi agent may be optionally conjugated with a lipophilic ligand, e.g., a C16 ligand, for instance on the sense strand. The RNAi agent may be optionally modified with a (S)-glycol nucleic acid (GNA) modification, for instance on one or more residues of the antisense strand. The resulting RNAi agents present superior gene silencing activity.

[0363] Accordingly, the disclosure provides double stranded RNAi agents capable of inhibiting the expression of a target gene (i.e., an ATXN2 gene) in vivo. The RNAi agent comprises a sense strand and an antisense strand. Each strand of the RNAi agent may be 15-30 nucleotides in length. For example, each strand may be 16-30 nucleotides in length, 17-30 nucleotides in length, 25-30 nucleotides in length, 27-30 nucleotides in length, 17-23 nucleotides in length, 17-21 nucleotides in length, 17-19 nucleotides in length, 19-25 nucleotides in length, 19-23 nucleotides in length, 19-21 nucleotides in length, 21-25 nucleotides in length, or 21-23 nucleotides in length. In certain embodiments, each strand is 19-23 nucleotides in length.

[0364] The sense strand and antisense strand typically form a duplex double stranded RNA (“dsRNA”), also referred to herein as an “RNAi agent.” The duplex region of an RNAi agent may be 15-30 nucleotide pairs in length. For example, the duplex region can be 16-30 nucleotide pairs in length, 17-30 nucleotide pairs in length, 27-30 nucleotide pairs in length, 17-23 nucleotide pairs in length, 17-21 nucleotide pairs in length, 17-19 nucleotide pairs in length, 19-25 nucleotide pairs in length, 19-23 nucleotide pairs in length, 19-21 nucleotide pairs in length, 21-25 nucleotide pairs in length, or 21-23 nucleotide pairs in length. In another example, the duplex region is selected from 15, 16, 17, 18, 19, 20, 21, 22, 23, 24, 25, 26, and 27 nucleotides in length. In preferred embodiments, the duplex region is 19-21 nucleotide pairs in length.

[0365] In one embodiment, the RNAi agent may contain one or more overhang regions or capping groups at the 3′-end, 5′-end, or both ends of one or both strands. The overhang can be 1-6 nucleotides in length, for instance 2-6 nucleotides in length, 1-5 nucleotides in length, 2-5 nucleotides in length, 1-4 nucleotides in length, 2-4 nucleotides in length, 1-3 nucleotides in length, 2-3 nucleotides in length, or 1-2 nucleotides in length. In preferred embodiments, the nucleotide overhang region is 2 nucleotides in length. The overhangs can be the result of one strand being longer than the other, or the result of two strands of the same length being staggered. The overhang can form a mismatch with the target mRNA or it can be complementary to the gene sequences being targeted or can be another sequence. The first and second strands can also be joined, e.g., by additional bases to form a hairpin, or by other non-base linkers.

[0366] In one embodiment, the nucleotides in the overhang region of the RNAi agent can each independently be a modified or unmodified nucleotide including, but no limited to 2′-sugar modified, such as, 2′-F, 2′-O-methyl, thymidine (T), and any combinations thereof.

[0367] For example, TT can be an overhang sequence for either end on either strand. The overhang can form a mismatch with the target mRNA or it can be complementary to the gene sequences being targeted or can be another sequence.

[0368] The 5′- or 3′- overhangs at the sense strand, antisense strand or both strands of the RNAi agent may be phosphorylated. In some embodiments, the overhang region(s) contains two nucleotides having a phosphorothioate between the two nucleotides, where the two nucleotides can be the same or different. In one embodiment, the overhang is present at the 3′-end of the sense strand, antisense strand, or both strands. In one embodiment, this 3′-overhang is present in the antisense strand. In one embodiment, this 3′-overhang is present in the sense strand.

[0369] The RNAi agent may contain only a single overhang, which can strengthen the interference activity of the RNAi, without affecting its overall stability. For example, the single-stranded overhang may be located at the 3′-terminal end of the sense strand or, alternatively, at the 3′-terminal end of the antisense strand. The RNAi may also have a blunt end, located at the 5′-end of the antisense strand (or the 3′-end of the sense strand) or vice versa. Generally, the antisense strand of the RNAi has a nucleotide overhang at the 3′-end, and the 5′-end is blunt. While not wishing to be bound by theory, the asymmetric blunt end at the 5′-end of the antisense strand and 3′-end overhang of the antisense strand favor the guide strand loading into RISC process.

[0370] In one embodiment, the RNAi agent is a double ended bluntmer of 19 nucleotides in length, wherein the sense strand contains at least one motif of three 2′-F modifications on three consecutive nucleotides at positions 7, 8, 9 from the 5′ end. The antisense strand contains at least one motif of three 2′-O-methyl modifications on three consecutive nucleotides at positions 11, 12, 13 from the 5′ end.

[0371] In another embodiment, the RNAi agent is a double ended bluntmer of 20 nucleotides in length, wherein the sense strand contains at least one motif of three 2′-F modifications on three consecutive nucleotides at positions 8, 9, 10 from the 5′ end. The antisense strand contains at least one motif of three 2′-O-methyl modifications on three consecutive nucleotides at positions 11, 12, 13 from the 5′ end.

[0372] In yet another embodiment, the RNAi agent is a double ended bluntmer of 21 nucleotides in length, wherein the sense strand contains at least one motif of three 2′-F modifications on three consecutive nucleotides at positions 9, 10, 11 from the 5′ end. The antisense strand contains at least one motif of three 2′-O-methyl modifications on three consecutive nucleotides at positions 11, 12, 13 from the 5′ end.

[0373] In one embodiment, the RNAi agent comprises a 21 nucleotide sense strand and a 23 nucleotide antisense strand, wherein the sense strand contains at least one motif of three 2′-F modifications on three consecutive nucleotides at positions 9, 10, 11 from the 5′ end; the antisense strand contains at least one motif of three 2′-O-methyl modifications on three consecutive nucleotides at positions 11, 12, 13 from the 5′ end, wherein one end of the RNAi agent is blunt, while the other end comprises a 2 nucleotide overhang. Optionally, the 2 nucleotide overhang is at the 3′-end of the antisense strand. When the 2 nucleotide overhang is at the 3′-end of the antisense strand, there may be two phosphorothioate internucleotide linkages between the terminal three nucleotides, wherein two of the three nucleotides are the overhang nucleotides, and the third nucleotide is a paired nucleotide next to the overhang nucleotide. In one embodiment, the RNAi agent additionally has two phosphorothioate internucleotide linkages between the terminal three nucleotides at both the 5′-end of the sense strand and at the 5′-end of the antisense strand. In one embodiment, every nucleotide in the sense strand and the antisense strand of the RNAi agent, including the nucleotides that are part of the motifs are modified nucleotides. In one embodiment each residue is independently modified with a 2′-O-methyl or 3′-fluoro, e.g., in an alternating motif. Optionally, the RNAi agent further comprises a ligand (e.g., a lipophilic ligand, optionally a C16 ligand).

[0374] In one embodiment, the RNAi agent comprises a sense and an antisense strand, wherein the sense strand is 25-30 nucleotide residues in length, wherein starting from the 5′ terminal nucleotide (position 1) positions 1 to 23 of the first strand comprise at least 8 ribonucleotides; the antisense strand is 36-66 nucleotide residues in length and, starting from the 3′ terminal nucleotide, comprises at least 8 ribonucleotides in the positions paired with positions 1-23 of sense strand to form a duplex; wherein at least the 3′terminal nucleotide of antisense strand is unpaired with sense strand, and up to 6 consecutive 3′ terminal nucleotides are unpaired with sense strand, thereby forming a 3′ single stranded overhang of 1-6 nucleotides; wherein the 5′ terminus of antisense strand comprises from 10-30 consecutive nucleotides which are unpaired with sense strand, thereby forming a 10-30 nucleotide single stranded 5′ overhang; wherein at least the sense strand 5′ terminal and 3′ terminal nucleotides are base paired with nucleotides of antisense strand when sense and antisense strands are aligned for maximum complementarity, thereby forming a substantially duplexed region between sense and antisense strands; and antisense strand is sufficiently complementary to a target RNA along at least 19 ribonucleotides of antisense strand length to reduce target gene expression when the double stranded nucleic acid is introduced into a mammalian cell; and wherein the sense strand contains at least one motif of three 2′-F modifications on three consecutive nucleotides, where at least one of the motifs occurs at or near the cleavage site. The antisense strand contains at least one motif of three 2′-O-methyl modifications on three consecutive nucleotides at or near the cleavage site.

[0375] In one embodiment, the RNAi agent comprises sense and antisense strands, wherein the RNAi agent comprises a first strand having a length which is at least 25 and at most 29 nucleotides and a second strand having a length which is at most 30 nucleotides with at least one motif of three 2′-O-methyl modifications on three consecutive nucleotides at position 11, 12, 13 from the 5′ end; wherein the 3′ end of the first strand and the 5′ end of the second strand form a blunt end and the second strand is 1-4 nucleotides longer at its 3′ end than the first strand, wherein the duplex region which is at least 25 nucleotides in length, and the second strand is sufficiently complementary to a target mRNA along at least 19 nucleotide of the second strand length to reduce target gene expression when the RNAi agent is introduced into a mammalian cell, and wherein dicer cleavage of the RNAi agent preferentially results in an siRNA comprising the 3′ end of the second strand, thereby reducing expression of the target gene in the mammal. Optionally, the RNAi agent further comprises a ligand.

[0376] In one embodiment, the sense strand of the RNAi agent contains at least one motif of three identical modifications on three consecutive nucleotides, where one of the motifs occurs at the cleavage site in the sense strand.

[0377] In one embodiment, the antisense strand of the RNAi agent can also contain at least one motif of three identical modifications on three consecutive nucleotides, where one of the motifs occurs at or near the cleavage site in the antisense strand.

[0378] For an RNAi agent having a duplex region of 17-23 nucleotide in length, the cleavage site of the antisense strand is typically around the 10, 11 and 12 positions from the 5′-end. Thus the motifs of three identical modifications may occur at the 9, 10, 11 positions; 10, 11, 12 positions; 11, 12, 13 positions; 12, 13, 14 positions; or 13, 14, 15 positions of the antisense strand, the count starting from the 1^{st} nucleotide from the 5′-end of the antisense strand, or, the count starting from the 1^{st} paired nucleotide within the duplex region from the 5′- end of the antisense strand. The cleavage site in the antisense strand may also change according to the length of the duplex region of the RNAi from the 5′-end.

[0379] The sense strand of the RNAi agent may contain at least one motif of three identical modifications on three consecutive nucleotides at the cleavage site of the strand; and the antisense strand may have at least one motif of three identical modifications on three consecutive nucleotides at or near the cleavage site of the strand. When the sense strand and the antisense strand form a dsRNA duplex, the sense strand and the antisense strand can be so aligned that one motif of the three nucleotides on the sense strand and one motif of the three nucleotides on the antisense strand have at least one nucleotide overlap, i.e., at least one of the three nucleotides of the motif in the sense strand forms a base pair with at least one of the three nucleotides of the motif in the antisense strand. Alternatively, at least two nucleotides may overlap, or all three nucleotides may overlap.

[0380] In one embodiment, the sense strand of the RNAi agent may contain more than one motif of three identical modifications on three consecutive nucleotides. The first motif may occur at or near the cleavage site of the strand and the other motifs may be a wing modification. The term “wing modification” herein refers to a motif occurring at another portion of the strand that is separated from the motif at or near the cleavage site of the same strand. The wing modification is either adjacent to the first motif or is separated by at least one or more nucleotides. When the motifs are immediately adjacent to each other, the chemistry of the motifs are distinct from each other; and when the motifs are separated by one or more nucleotide, the chemistries can be the same or different. Two or more wing modifications may be present. For instance, when two wing modifications are present, each wing modification may occur at one end relative to the first motif which is at or near cleavage site or on either side of the lead motif.

[0381] Like the sense strand, the antisense strand of the RNAi agent may contain more than one motif of three identical modifications on three consecutive nucleotides, with at least one of the motifs occurring at or near the cleavage site of the strand. This antisense strand may also contain one or more wing modifications in an alignment similar to the wing modifications that may be present on the sense strand.

[0382] In one embodiment, the wing modification on the sense strand or antisense strand of the RNAi agent typically does not include the first one or two terminal nucleotides at the 3′-end, 5′-end or both ends of the strand.

[0383] In another embodiment, the wing modification on the sense strand or antisense strand of the RNAi agent typically does not include the first one or two paired nucleotides within the duplex region at the 3′-end, 5′-end or both ends of the strand.

[0384] When the sense strand and the antisense strand of the RNAi agent each contain at least one wing modification, the wing modifications may fall on the same end of the duplex region, and have an overlap of one, two or three nucleotides.

[0385] When the sense strand and the antisense strand of the RNAi agent each contain at least two wing modifications, the sense strand and the antisense strand can be so aligned that two modifications each from one strand fall on one end of the duplex region, having an overlap of one, two or three nucleotides; two modifications each from one strand fall on the other end of the duplex region, having an overlap of one, two or three nucleotides; two modifications one strand fall on each side of the lead motif, having an overlap of one, two, or three nucleotides in the duplex region.

[0386] In one embodiment, the RNAi agent comprises mismatch(es) with the target, within the duplex, or combinations thereof. The mismatch may occur in the overhang region or the duplex region. The base pair may be ranked on the basis of their propensity to promote dissociation or melting (e.g., on the free energy of association or dissociation of a particular pairing, the simplest approach is to examine the pairs on an individual pair basis, though next neighbor or similar analysis can also be used). In terms of promoting dissociation: A:U is preferred over G:C; G:U is preferred over G:C; and I:C (I=inosine) is preferred over G:C. Mismatches, e.g., non-canonical or other than canonical pairings (as described elsewhere herein) are preferred over canonical (A:T, A:U, G:C) pairings; and pairings which include a universal base are preferred over canonical pairings.

[0387] In one embodiment, the RNAi agent comprises at least one of the first 1, 2, 3, 4, or 5 base pairs within the duplex regions from the 5′- end of the antisense strand independently selected from the group of: A:U, G:U, I:C, and mismatched pairs, e.g., non-canonical or other than canonical pairings or pairings which include a universal base, to promote the dissociation of the antisense strand at the 5′-end of the duplex.

[0388] In one embodiment, the nucleotide at the 1 position within the duplex region from the 5′-end in the antisense strand is selected from the group consisting of A, dA, dU, U, and dT. Alternatively, at least one of the first 1, 2 or 3 base pair within the duplex region from the 5′- end of the antisense strand is an AU base pair. For example, the first base pair within the duplex region from the 5′- end of the antisense strand is an AU base pair.

[0389] In another embodiment, the nucleotide at the 3′-end of the sense strand is deoxy-thymine (dT). In another embodiment, the nucleotide at the 3′-end of the antisense strand is deoxy-thymine (dT). In one embodiment, there is a short sequence of deoxy-thymine nucleotides, for example, two dT nucleotides on the 3′-end of the sense or antisense strand.

[0390] In one embodiment, the sense strand sequence may be represented by formula (I):

(I)
5′ nₚ-Nₐ-(X X X )ᵢ-N_{b}-Y Y Y-N_{b}-(Z Z Z )ⱼ-Nₐ-n_{q} 3′

[0391] wherein:
[0392] i and j are each independently 0 or 1;
[0393] p and q are each independently 0-6;
[0394] each Nₐ independently represents an oligonucleotide sequence comprising 0-25 modified nucleotides, each sequence comprising at least two differently modified nucleotides;
[0395] each N_{b} independently represents an oligonucleotide sequence comprising 0-10 modified nucleotides;
[0396] each nₚ and n_{q} independently represent an overhang nucleotide;
[0397] wherein Nb and Y do not have the same modification; and
[0398] XXX, YYY and ZZZ each independently represent one motif of three identical modifications on three consecutive nucleotides. Optionally YYY is all 2′-F modified nucleotides.

[0399] In one embodiment, the Nₐ or N_{b} comprise modifications of alternating pattern.

[0400] In one embodiment, the YYY motif occurs at or near the cleavage site of the sense strand. For example, when the RNAi agent has a duplex region of 17-23 nucleotides in length, the YYY motif can occur at or the vicinity of the cleavage site (e.g.: can occur at positions 6, 7, 8, 7, 8, 9, 8, 9, 10, 9, 10, 11, 10, 11, 12 or 11, 12, 13) of—the sense strand, the count starting from the 1^{st} nucleotide, from the 5′-end; or optionally, the count starting at the 1^{st} paired nucleotide within the duplex region, from the 5′- end.

[0401] In one embodiment, i is 1 and j is 0, or i is 0 and j is 1, or both i and j are 1. The sense strand can therefore be represented by the following formulas:

(Ib)
5′ nₚ-Nₐ-YYY-N_{b}-ZZZ-Nₐ-n_{q} 3′;
(Ic)
5′ nₚ-Nₐ-XXX-N_{b}-YYY-Nₐ-n_{q} 3′;
or
(Id)
5′ nₚ-Nₐ-XXX-N_{b}-YYY-N_{b}-ZZZ-Nₐ-n_{q} 3′.

[0402] When the sense strand is represented by formula (Ib), N_{b} represents an oligonucleotide sequence comprising 0-10, 0-7, 0-5, 0-4, 0-2 or 0 modified nucleotides.

[0403] Each Nₐ independently can represent an oligonucleotide sequence comprising 2-20, 2-15, or 2-10 modified nucleotides.

[0404] When the sense strand is represented as formula (Ic), N_{b} represents an oligonucleotide sequence comprising 0-10, 0-7, 0-10, 0-7, 0-5, 0-4, 0-2 or 0 modified nucleotides. Each Nₐ can independently represent an oligonucleotide sequence comprising 2-20, 2-15, or 2-10 modified nucleotides.

[0405] When the sense strand is represented as formula (Id), each N_{b} independently represents an oligonucleotide sequence comprising 0-10, 0-7, 0-5, 0-4, 0-2 or 0 modified nucleotides. Optionally, N_{b} is 0, 1, 2, 3, 4, 5 or 6. Each Nₐ can independently represent an oligonucleotide sequence comprising 2-20, 2-15, or 2-10 modified nucleotides.

[0406] Each of X, Y and Z may be the same or different from each other.

[0407] In other embodiments, i is 0 and j is 0, and the sense strand may be represented by the formula:

(Ia)
5′ nₚ-Nₐ-YYY-Nₐ-n_{q} 3′.

[0408] When the sense strand is represented by formula (Ia), each Nₐ independently can represent an oligonucleotide sequence comprising 2-20, 2-15, or 2-10 modified nucleotides.

[0409] In one embodiment, the antisense strand sequence of the RNAi may be represented by formula (II):

(II)
5′ n_{q′}-Nₐ′-(Z′Z′Z′)ₖ-N_{b}′-Y′Y′Y′-N_{b}′-(X′X′X′)ₗ-N′ₐ-
nₚ′ 3′

[0410] wherein:
[0411] k and 1 are each independently 0 or 1;
[0412] p‘ and q’ are each independently 0-6;
   each Nₐ′ independently represents an oligonucleotide sequence comprising 0-25 modified nucleotides, each sequence comprising at least two differently modified nucleotides; each N_{b}′ independently represents an oligonucleotide sequence comprising 0-10 modified nucleotides;
   each nₚ′ and n_{q}′independently represent an overhang nucleotide;
   wherein N_{b}‘ and Y’ do not have the same modification;
   and
   X′X′X′, Y′Y′Y′ and Z′Z′Z′ each independently represent one motif of three identical modifications on three consecutive nucleotides.
   In one embodiment, the Nₐ‘ or N_{b}’ comprise modifications of alternating pattern.

[0413] The Y′Y′Y′ motif occurs at or near the cleavage site of the antisense strand. For example, when the RNAi agent has a duplex region of 17-23nucleotidein length, the Y′Y′Y′ motif can occur at positions 9, 10, 11; 10, 11, 12; 11, 12, 13; 12, 13, 14; or 13, 14, 15 of the antisense strand, with the count starting from the 1^{st} nucleotide, from the 5′-end; or optionally, the count starting at the 1^{st} paired nucleotide within the duplex region, from the 5′- end. Optionally, the Y′Y′Y′ motif occurs at positions 11, 12, 13.

[0414] In one embodiment, Y′Y′Y′ motif is all 2′-OMe modified nucleotides.

[0415] In one embodiment, k is 1 and 1 is 0, or k is 0 and 1 is 1, or both k and 1 are 1.

[0416] The antisense strand can therefore be represented by the following formulas:

(IIb)
5′ n_{q′}-Nₐ′-Z′Z′Z′-N_{b}′-Y′Y′Y′-Nₐ′-n_{p′}
(IIc)
5′ n_{q′}-Nₐ′-Y′Y′Y′-N_{b}′-X′X′X′-n_{p′} 3′;
or
(IId)
5′ n_{q′}-Nₐ′-Z′Z′Z′-N_{b}′-Y′Y′Y′-N_{b}′-X′X′X′-Nₐ′-n_{p′} 3′.

[0417] When the antisense strand is represented by formula (IIb), N_{b}′ represents an oligonucleotide sequence comprising 0-10, 0-7, 0-10, 0-7, 0-5, 0-4, 0-2 or 0 modified nucleotides. Each Nₐ′ independently represents an oligonucleotide sequence comprising 2-20, 2-15, or 2-10 modified nucleotides.

[0418] When the antisense strand is represented as formula (IIc), N_{b}′ represents an oligonucleotide sequence comprising 0-10, 0-7, 0-10, 0-7, 0-5, 0-4, 0-2 or 0 modified nucleotides. Each Nₐ′ independently represents an oligonucleotide sequence comprising 2-20, 2-15, or 2-10 modified nucleotides.

[0419] When the antisense strand is represented as formula (IId), each N_{b}′ independently represents an oligonucleotide sequence comprising 0-10, 0-7, 0-10, 0-7, 0-5, 0-4, 0-2 or 0 modified nucleotides. Each Nₐ′ independently represents an oligonucleotide sequence comprising 2-20, 2-15, or 2-10 modified nucleotides. Optionally, N_{b} is 0, 1, 2, 3, 4, 5 or 6.

[0420] In other embodiments, k is 0 and 1 is 0 and the antisense strand may be represented by the formula:

(Ia)
5′ n_{p′}-N_{a′}-Y′Y′Y′-N_{a′}-n_{q′} 3′.

[0421] When the antisense strand is represented as formula (IIa), each Nₐ′ independently represents an oligonucleotide sequence comprising 2-20, 2-15, or 2-10 modified nucleotides.

[0422] Each of X′, Y′ and Z′ may be the same or different from each other.

[0423] Each nucleotide of the sense strand and antisense strand may be independently modified with LNA, HNA, CeNA, 2′-methoxyethyl, 2′-O-methyl, 2′-O-allyl, 2′-C-allyl, 2′-hydroxyl, or 2′-fluoro. For example, each nucleotide of the sense strand and antisense strand is independently modified with 2′-O-methyl or 2′-fluoro. Each X, Y, Z, X′, Y′ and Z′, in particular, may represent a 2′-O-methyl modification or a 2′-fluoro modification.

[0424] In one embodiment, the sense strand of the RNAi agent may contain YYY motif occurring at 9, 10 and 11 positions of the strand when the duplex region is 21 nt, the count starting from the 1^{st} nucleotide from the 5′-end, or optionally, the count starting at the 1^{st} paired nucleotide within the duplex region, from the 5′- end; and Y represents 2′-F modification. The sense strand may additionally contain XXX motif or ZZZ motifs as wing modifications at the opposite end of the duplex region; and XXX and ZZZ each independently represents a 2′-OMe modification or 2′-F modification.

[0425] In one embodiment the antisense strand may contain Y′Y′Y′ motif occurring at positions 11, 12, 13 of the strand, the count starting from the 1^{st} nucleotide from the 5′-end, or optionally, the count starting at the 1^{st} paired nucleotide within the duplex region, from the 5′- end; and Y′ represents 2′-O-methyl modification. The antisense strand may additionally contain X′X′X′ motif or Z′Z′Z′ motifs as wing modifications at the opposite end of the duplex region; and X′X′X′ and Z′Z′Z′ each independently represents a 2′-OMe modification or 2′-F modification.

[0426] The sense strand represented by any one of the above formulas (Ia), (Ib), (Ic), and (Id) forms a duplex with an antisense strand being represented by any one of formulas (IIa), (IIb), (IIc), and (IId), respectively.

[0427] Accordingly, the RNAi agents for use in the methods of the disclosure may comprise a sense strand and an antisense strand, each strand having 14 to 30 nucleotides, the RNAi duplex represented by formula (III):

(III)
sense:
5′ nₚ-Nₐ-(X X X)ᵢ-N_{b}-Y Y Y-N_{b}-(Z Z Z)ⱼ-Nₐ-n_{q} 3′
antisense:
3′ nₚ′-Nₐ′-(X′X′X′)ₖ-N_{b}′-Y′Y′Y′-N_{b}′-(Z′Z′Z′)ₜ-Nₐ′-
n_{q}′ 5′

[0428] wherein:
[0429] i, j, k, and 1 are each independently 0 or 1;
[0430] p, p′, q, and q′ are each independently 0-6;
[0431] each Nₐ and Nₐ′ independently represents an oligonucleotide sequence comprising 0-25 modified nucleotides, each sequence comprising at least two differently modified nucleotides;
[0432] each N_{b} and N_{b}′ independently represents an oligonucleotide sequence comprising 0-10 modified nucleotides;
[0433] wherein
[0434] each nₚ′, nₚ, n_{q}′, and n_{q}, each of which may or may not be present, independently represents an overhang nucleotide; and
[0435] XXX, YYY, ZZZ, X′X′X′, Y′Y′Y′, and Z′Z′Z′ each independently represent one motif of three identical modifications on three consecutive nucleotides.

[0436] In one embodiment, i is 0 and j is 0; or i is 1 and j is 0; or i is 0 and j is 1; or both i and j are 0; or both i and j are 1. In another embodiment, k is 0 and 1 is 0; or k is 1 and 1 is 0; k is 0 and 1 is 1; or both k and 1 are 0; or both k and 1 are 1.

[0437] Exemplary combinations of the sense strand and antisense strand forming an RNAi duplex include the formulas below:

(IIIa)
5′ nₚ-Nₐ-Y Y Y-Nₐ-n_{q} 3′
3′ nₚ′-Nₐ′-Y′Y′Y′-Nₐ′n_{q} 5′
(IIIb)
5′ nₚ-Nₐ-Y Y Y-N_{b}-ZZZ-Nₐ-n_{q} 3′
3′ nₚ′-Nₐ′-Y′Y′Y′-N_{b}′-Z′Z′Z′-Nₐ′n_{q}′ 5′
(IIIc)
5′ nₚ-Nₐ-X X X-N_{b}-Y Y Y-Nₐ-n_{q} 3′
3′ nₚ′-Nₐ′-X′X′X′-N_{b}′-Y′Y′Y′-Nₐ′-n_{q}′ 5′
(IIId)
5′ nₚ-Nₐ-XXX-N_{b}-Y Y Y-N_{b}-ZZZ-Nₐ-n_{q} 3′
3′ nₚ′-Nₐ′-X′X′X′-N_{b}′-Y′Y′Y′-N_{b}′-Z′Z′Z′-Nₐ-n_{q}′ 5′

[0438] When the RNAi agent is represented by formula (IIIa), each Nₐ independently represents an oligonucleotide sequence comprising 2-20, 2-15, or 2-10 modified nucleotides.

[0439] When the RNAi agent is represented by formula (IIIb), each N_{b} independently represents an oligonucleotide sequence comprising 1-10, 1-7, 1-5 or 1-4 modified nucleotides. Each Nₐ independently represents an oligonucleotide sequence comprising 2-20, 2-15, or 2-10 modified nucleotides.

[0440] When the RNAi agent is represented as formula (IIIc), each N_{b}, N_{b}′ independently represents an oligonucleotide sequence comprising 0-10, 0-7, 0-10, 0-7, 0-5, 0-4, 0-2 or 0 modified nucleotides. Each Nₐ independently represents an oligonucleotide sequence comprising 2-20, 2-15, or 2-10 modified nucleotides.

[0441] When the RNAi agent is represented as formula (IIId), each N_{b}, N_{b}′ independently represents an oligonucleotide sequence comprising 0-10, 0-7, 0-10, 0-7, 0-5, 0-4, 0-2 or 0 modified nucleotides. Each Nₐ, Nₐ independently represents an oligonucleotide sequence comprising 2-20, 2-15, or 2-10 modified nucleotides. Each of Nₐ, Nₐ′, N_{b} and N_{b}′ independently comprises modifications of alternating pattern.

[0442] In one embodiment, when the RNAi agent is represented by formula (IIId), the Nₐ modifications are 2′-O-methyl or 2′-fluoro modifications. In another embodiment, when the RNAi agent is represented by formula (IIId), the Nₐ modifications are 2′-O-methyl or 2′-fluoro modifications and nₚ′>0 and at least one nₚ′ is linked to a neighboring nucleotide a via phosphorothioate linkage. In yet another embodiment, when the RNAi agent is represented by formula (IIId), the Nₐ modifications are 2′-O-methyl or 2′-fluoro modifications, nₚ′>0 and at least one nₚ′ is linked to a neighboring nucleotide via phosphorothioate linkage, and the sense strand is conjugated to one or more C16 (or related) moieties attached through a bivalent or trivalent branched linker (described below). In another embodiment, when the RNAi agent is represented by formula (IIId), the Nₐ modifications are 2′-O-methyl or 2′-fluoro modifications, nₚ′>0 and at least one nₚ′ is linked to a neighboring nucleotide via phosphorothioate linkage, the sense strand comprises at least one phosphorothioate linkage, and the sense strand is conjugated to one or more lipophilic, e.g., C16 (or related) moieties, optionally attached through a bivalent or trivalent branched linker.

[0443] In one embodiment, when the RNAi agent is represented by formula (IIIa), the Nₐ modifications are 2′-O-methyl or 2′-fluoro modifications, nₚ′>0 and at least one nₚ′ is linked to a neighboring nucleotide via phosphorothioate linkage, the sense strand comprises at least one phosphorothioate linkage, and the sense strand is conjugated to one or more lipophilic, e.g., C16 (or related) moieties attached through a bivalent or trivalent branched linker.

[0444] In one embodiment, the RNAi agent is a multimer containing at least two duplexes represented by formula (III), (IIIa), (IIIb), (IIIc), and (IIId), wherein the duplexes are connected by a linker. The linker can be cleavable or non-cleavable. Optionally, the multimer further comprises a ligand. Each of the duplexes can target the same gene or two different genes; or each of the duplexes can target same gene at two different target sites.

[0445] In one embodiment, the RNAi agent is a multimer containing three, four, five, six or more duplexes represented by formula (III), (IIIa), (IIIb), (IIIc), and (IIId), wherein the duplexes are connected by a linker. The linker can be cleavable or non-cleavable. Optionally, the multimer further comprises a ligand. Each of the duplexes can target the same gene or two different genes; or each of the duplexes can target same gene at two different target sites.

[0446] In one embodiment, two RNAi agents represented by formula (III), (IIIa), (IIIb), (IIIc), and (IIId) are linked to each other at the 5′ end, and one or both of the 3′ ends and are optionally conjugated to a ligand. Each of the agents can target the same gene or two different genes; or each of the agents can target same gene at two different target sites.

[0447] Various publications describe multimeric RNAi agents that can be used in the methods of the disclosure. Such publications include WO2007/091269, WO2010/141511, WO2007/117686, WO2009/014887, and WO2011/031520; and U.S. Pat. No. 7,858,769, the entire contents of each of which are hereby incorporated herein by reference.

[0448] In certain embodiments, the compositions and methods of the disclosure include a vinyl phosphonate (VP) modification of an RNAi agent as described herein. In exemplary embodiments, a vinyl phosphonate of the disclosure has the following structure:

[chemical structure]

A vinyl phosphonate of the instant disclosure may be attached to either the antisense or the sense strand of a dsRNA of the disclosure. In certain preferred embodiments, a vinyl phosphonate of the instant disclosure is attached to the antisense strand of a dsRNA, optionally at the 5′ end of the antisense strand of the dsRNA.

[0449] Vinyl phosphate modifications are also contemplated for the compositions and methods of the instant disclosure. An exemplary vinyl phosphate structure is:

[chemical structure]

### B. Thermally Destabilizing Modifications

[0450] In certain embodiments, a dsRNA molecule can be optimized for RNA interference by incorporating thermally destabilizing modifications in the seed region of the antisense strand (i.e., at positions 2-9 of the 5′-end of the antisense strand) to reduce or inhibit off-target gene silencing. It has been discovered that dsRNAs with an antisense strand comprising at least one thermally destabilizing modification of the duplex within the first 9 nucleotide positions, counting from the 5′ end, of the antisense strand have reduced off-target gene silencing activity. Accordingly, in some embodiments, the antisense strand comprises at least one (e.g., one, two, three, four, five or more) thermally destabilizing modification of the duplex within the first 9 nucleotide positions of the 5′ region of the antisense strand. In some embodiments, one or more thermally destabilizing modification(s) of the duplex is/are located in positions 2-9, or optionally positions 4-8, from the 5′-end of the antisense strand. In some further embodiments, the thermally destabilizing modification(s) of the duplex is/are located at position 6, 7 or 8 from the 5′-end of the antisense strand. In still some further embodiments, the thermally destabilizing modification of the duplex is located at position 7 from the 5′-end of the antisense strand. The term “thermally destabilizing modification(s)” includes modification(s) that would result with a dsRNA with a lower overall melting temperature (Tm) (optionally a Tm with one, two, three or four degrees lower than the Tm of the dsRNA without having such modification(s). In some embodiments, the thermally destabilizing modification of the duplex is located at position 2, 3, 4, 5 or 9 from the 5′-end of the antisense strand.

[0451] The thermally destabilizing modifications can include, but are not limited to, abasic modification; mismatch with the opposing nucleotide in the opposing strand; and sugar modification such as 2′-deoxy modification or acyclic nucleotide, e.g., unlocked nucleic acids (UNA) or glycol nucleic acid (GNA).

[0452] Exemplified abasic modifications include, but are not limited to the following:

[chemical structure]

### Wherein R═H, Me, Et or OMe; R′ ═H, Me, Et or OMe; R″═H, Me, Et or OMe

[chemical structure]

wherein B is a modified or unmodified nucleobase.

[0454] Exemplified sugar modifications include, but are not limited to the following:

[chemical structure]

wherein B is a modified or unmodified nucleobase.

[0455] In some embodiments the thermally destabilizing modification of the duplex is selected from the group consisting of:

[chemical structure]

wherein B is a modified or unmodified nucleobase and the asterisk on each structure represents either R, S or racemic.

[0456] The term “acyclic nucleotide” refers to any nucleotide having an acyclic ribose sugar, for example, where any of bonds between the ribose carbons (e.g., C1′-C2′, C2′-C3′, C3′-C4′, C4′-04′, or C1′-04′) is absent or at least one of ribose carbons or oxygen (e.g., C1′, C2′, C3′, C4′ or 04′) are independently or in combination absent from the nucleotide. In some embodiments, acyclic nucleotide is

[chemical structure]

wherein B is a modified or unmodified nucleobase, R¹ and R² independently are H, halogen, OR₃, or alkyl; and R₃ is H, alkyl, cycloalkyl, aryl, aralkyl, heteroaryl or sugar).

[0457] The term “UNA” refers to unlocked acyclic nucleic acid, wherein any of the bonds of the sugar has been removed, forming an unlocked “sugar” residue. In one example, UNA also encompasses monomers with bonds between C1′-C4′ being removed (i.e. the covalent carbon-oxygen-carbon bond between the C1′ and C4′ carbons). In another example, the C2′-C3′ bond (i.e. the covalent carbon-carbon bond between the C2′ and C3′ carbons) of the sugar is removed (see Mikhailov et. al., Tetrahedron Letters, 26 (17): 2059 (1985); and Fluiter et al., Mol. Biosyst., 10: 1039 (2009), which are hereby incorporated by reference in their entirety). The acyclic derivative provides greater backbone flexibility without affecting the Watson-Crick pairings. The acyclic nucleotide can be linked via 2′-5′ or 3′-5′ linkage.

[0458] The term ‘GNA’ refers to glycol nucleic acid which is a polymer similar to DNA or RNA but differing in the composition of its “backbone” in that is composed of repeating glycerol units linked by phosphodiester bonds:

[chemical structure]

[0459] The thermally destabilizing modification of the duplex can be mismatches (i.e., noncomplementary base pairs) between the thermally destabilizing nucleotide and the opposing nucleotide in the opposite strand within the dsRNA duplex. Exemplary mismatch base pairs include G:G, G:A, G:U, G:T, A:A, A:C, C:C, C:U, C:T, U:U, T:T, U:T, or a combination thereof. Other mismatch base pairings known in the art are also amenable to the present disclosure. A mismatch can occur between nucleotides that are either naturally occurring nucleotides or modified nucleotides, i.e., the mismatch base pairing can occur between the nucleobases from respective nucleotides independent of the modifications on the ribose sugars of the nucleotides. In certain embodiments, the dsRNA molecule contains at least one nucleobase in the mismatch pairing that is a 2′-deoxy nucleobase; e.g., the 2′-deoxy nucleobase is in the sense strand.

[0460] In some embodiments, the thermally destabilizing modification of the duplex in the seed region of the antisense strand includes nucleotides with impaired W—C H-bonding to complementary base on the target mRNA, such as:

[chemical structure]

[0461] More examples of abasic nucleotide, acyclic nucleotide modifications (including UNA and GNA), and mismatch modifications have been described in detail in WO 2011/133876, which is herein incorporated by reference in its entirety.

The thermally destabilizing modifications may also include universal base with reduced or abolished capability to form hydrogen bonds with the opposing bases, and phosphate modifications.

[0462] In some embodiments, the thermally destabilizing modification of the duplex includes nucleotides with non-canonical bases such as, but not limited to, nucleobase modifications with impaired or completely abolished capability to form hydrogen bonds with bases in the opposite strand. These nucleobase modifications have been evaluated for destabilization of the central region of the dsRNA duplex as described in WO 2010/0011895, which is herein incorporated by reference in its entirety. Exemplary nucleobase modifications are:

[chemical structure]

[0463] In some embodiments, the thermally destabilizing modification of the duplex in the seed region of the antisense strand includes one or more α-nucleotide complementary to the base on the target mRNA, such as:

[chemical structure]

wherein R is H, OH, OCH₃, F, NH₂, NHMe, NMe₂ or O-alkyl.

[0464] Exemplary phosphate modifications known to decrease the thermal stability of dsRNA duplexes compared to natural phosphodiester linkages are:

[chemical structure]

[0465] The alkyl for the R group can be a C1-C6alkyl. Specific alkyls for the R group include, but are not limited to methyl, ethyl, propyl, isopropyl, butyl, pentyl and hexyl.

As the skilled artisan will recognize, in view of the functional role of nucleobases is defining specificity of an RNAi agent of the disclosure, while nucleobase modifications can be performed in the various manners as described herein, e.g., to introduce destabilizing modifications into an RNAi agent of the disclosure, e.g., for purpose of enhancing on-target effect relative to off-target effect, the range of modifications available and, in general, present upon RNAi agents of the disclosure tends to be much greater for non-nucleobase modifications, e.g., modifications to sugar groups or phosphate backbones of polyribonucleotides. Such modifications are described in greater detail in other sections of the instant disclosure and are expressly contemplated for RNAi agents of the disclosure, either possessing native nucleobases or modified nucleobases as described above or elsewhere herein.

[0466] In addition to the antisense strand comprising a thermally destabilizing modification, the dsRNA can also comprise one or more stabilizing modifications. For example, the dsRNA can comprise at least two (e.g., two, three, four, five, six, seven, eight, nine, ten or more) stabilizing modifications. Without limitations, the stabilizing modifications all can be present in one strand. In some embodiments, both the sense and the antisense strands comprise at least two stabilizing modifications. The stabilizing modification can occur on any nucleotide of the sense strand or antisense strand. For instance, the stabilizing modification can occur on every nucleotide on the sense strand or antisense strand; each stabilizing modification can occur in an alternating pattern on the sense strand or antisense strand; or the sense strand or antisense strand comprises both stabilizing modification in an alternating pattern. The alternating pattern of the stabilizing modifications on the sense strand may be the same or different from the antisense strand, and the alternating pattern of the stabilizing modifications on the sense strand can have a shift relative to the alternating pattern of the stabilizing modifications on the antisense strand.

[0467] In some embodiments, the antisense strand comprises at least two (e.g., two, three, four, five, six, seven, eight, nine, ten or more) stabilizing modifications. Without limitations, a stabilizing modification in the antisense strand can be present at any positions. In some embodiments, the antisense comprises stabilizing modifications at positions 2, 6, 8, 9, 14, and 16 from the 5′-end. In some other embodiments, the antisense comprises stabilizing modifications at positions 2, 6, 14, and 16 from the 5′-end. In still some other embodiments, the antisense comprises stabilizing modifications at positions 2, 14, and 16 from the 5′-end.

[0468] In some embodiments, the antisense strand comprises at least one stabilizing modification adjacent to the destabilizing modification. For example, the stabilizing modification can be the nucleotide at the 5′-end or the 3′-end of the destabilizing modification, i.e., at position −1 or +1 from the position of the destabilizing modification. In some embodiments, the antisense strand comprises a stabilizing modification at each of the 5′-end and the 3′-end of the destabilizing modification, i.e., positions −1 and +1 from the position of the destabilizing modification.

[0469] In some embodiments, the antisense strand comprises at least two stabilizing modifications at the 3′-end of the destabilizing modification, i.e., at positions +1 and +2 from the position of the destabilizing modification.

[0470] In some embodiments, the sense strand comprises at least two (e.g., two, three, four, five, six, seven, eight, nine, ten or more) stabilizing modifications. Without limitations, a stabilizing modification in the sense strand can be present at any positions. In some embodiments, the sense strand comprises stabilizing modifications at positions 7, 10, and 11 from the 5′-end. In some other embodiments, the sense strand comprises stabilizing modifications at positions 7, 9, 10, and 11 from the 5′-end. In some embodiments, the sense strand comprises stabilizing modifications at positions opposite or complimentary to positions 11, 12, and 15 of the antisense strand, counting from the 5′-end of the antisense strand. In some other embodiments, the sense strand comprises stabilizing modifications at positions opposite or complimentary to positions 11, 12, 13, and 15 of the antisense strand, counting from the 5′-end of the antisense strand. In some embodiments, the sense strand comprises a block of two, three, or four stabilizing modifications.

[0471] In some embodiments, the sense strand does not comprise a stabilizing modification in position opposite or complimentary to the thermally destabilizing modification of the duplex in the antisense strand.

[0472] Exemplary thermally stabilizing modifications include, but are not limited to, 2′-fluoro modifications. Other thermally stabilizing modifications include, but are not limited to, LNA.

[0473] In some embodiments, the dsRNA of the disclosure comprises at least four (e.g., four, five, six, seven, eight, nine, ten, or more) 2′-fluoro nucleotides. Without limitations, the 2′-fluoro nucleotides all can be present in one strand. In some embodiments, both the sense and the antisense strands comprise at least two 2′-fluoro nucleotides. The 2′-fluoro modification can occur on any nucleotide of the sense strand or antisense strand. For instance, the 2′-fluoro modification can occur on every nucleotide on the sense strand or antisense strand; each 2′-fluoro modification can occur in an alternating pattern on the sense strand or antisense strand; or the sense strand or antisense strand comprises both 2′-fluoro modifications in an alternating pattern. The alternating pattern of the 2′-fluoro modifications on the sense strand may be the same or different from the antisense strand, and the alternating pattern of the 2′-fluoro modifications on the sense strand can have a shift relative to the alternating pattern of the 2′-fluoro modifications on the antisense strand.

[0474] In some embodiments, the antisense strand comprises at least two (e.g., two, three, four, five, six, seven, eight, nine, ten, or more) 2′-fluoro nucleotides. Without limitations, a 2′-fluoro modification in the antisense strand can be present at any positions. In some embodiments, the antisense comprises 2′-fluoro nucleotides at positions 2, 6, 8, 9, 14, and 16 from the 5′-end. In some other embodiments, the antisense comprises 2′-fluoro nucleotides at positions 2, 6, 14, and 16 from the 5′-end. In still some other embodiments, the antisense comprises 2′-fluoro nucleotides at positions 2, 14, and 16 from the 5′-end.

[0475] In some embodiments, the antisense strand comprises at least one 2′-fluoro nucleotide adjacent to the destabilizing modification. For example, the 2′-fluoro nucleotide can be the nucleotide at the 5′-end or the 3′-end of the destabilizing modification, i.e., at position −1 or +1 from the position of the destabilizing modification. In some embodiments, the antisense strand comprises a 2′-fluoro nucleotide at each of the 5′-end and the 3′-end of the destabilizing modification, i.e., positions −1 and +1 from the position of the destabilizing modification.

[0476] In some embodiments, the antisense strand comprises at least two 2′-fluoro nucleotides at the 3′-end of the destabilizing modification, i.e., at positions+1 and +2 from the position of the destabilizing modification.

[0477] In some embodiments, the sense strand comprises at least two (e.g., two, three, four, five, six, seven, eight, nine, ten or more) 2′-fluoro nucleotides. Without limitations, a 2′-fluoro modification in the sense strand can be present at any positions. In some embodiments, the antisense comprises 2′-fluoro nucleotides at positions 7, 10, and 11 from the 5′-end. In some other embodiments, the sense strand comprises 2′-fluoro nucleotides at positions 7, 9, 10, and 11 from the 5′-end. In some embodiments, the sense strand comprises 2′-fluoro nucleotides at positions opposite or complimentary to positions 11, 12, and 15 of the antisense strand, counting from the 5′-end of the antisense strand. In some other embodiments, the sense strand comprises 2′-fluoro nucleotides at positions opposite or complimentary to positions 11, 12, 13, and 15 of the antisense strand, counting from the 5′-end of the antisense strand. In some embodiments, the sense strand comprises a block of two, three or four 2′-fluoro nucleotides.

[0478] In some embodiments, the sense strand does not comprise a 2′-fluoro nucleotide in position opposite or complimentary to the thermally destabilizing modification of the duplex in the antisense strand.

[0479] In some embodiments, the dsRNA molecule of the disclosure comprises a 21 nucleotides (nt) sense strand and a 23 nucleotides (nt) antisense, wherein the antisense strand contains at least one thermally destabilizing nucleotide, where the at least one thermally destabilizing nucleotide occurs in the seed region of the antisense strand (i.e., at position 2-9 of the 5′-end of the antisense strand), wherein one end of the dsRNA is blunt, while the other end is comprises a 2 nt overhang, and wherein the dsRNA optionally further has at least one (e.g., one, two, three, four, five, six or all seven) of the following characteristics: (i) the antisense comprises 2, 3, 4, 5 or 6 2′-fluoro modifications; (ii) the antisense comprises 1, 2, 3, 4 or 5 phosphorothioate internucleotide linkages; (iii) the sense strand is conjugated with a ligand; (iv) the sense strand comprises 2, 3, 4 or 5 2′-fluoro modifications; (v) the sense strand comprises 1, 2, 3, 4 or 5 phosphorothioate internucleotide linkages; (vi) the dsRNA comprises at least four 2′-fluoro modifications; and (vii) the dsRNA comprises a blunt end at 5′-end of the antisense strand. Optionally, the 2 nt overhang is at the 3′-end of the antisense.

[0480] In some embodiments, the dsRNA molecule of the disclosure comprising a sense and antisense strands, wherein: the sense strand is 25-30 nucleotide residues in length, wherein starting from the 5′ terminal nucleotide (position 1), positions 1 to 23 of said sense strand comprise at least 8 ribonucleotides; antisense strand is 36-66 nucleotide residues in length and, starting from the 3′ terminal nucleotide, at least 8 ribonucleotides in the positions paired with positions 1-23 of sense strand to form a duplex; wherein at least the 3′terminal nucleotide of antisense strand is unpaired with sense strand, and up to 6 consecutive 3′ terminal nucleotides are unpaired with sense strand, thereby forming a 3′ single stranded overhang of 1-6 nucleotides; wherein the 5′ terminus of antisense strand comprises from 10-30 consecutive nucleotides which are unpaired with sense strand, thereby forming a 10-30 nucleotide single stranded 5′ overhang; wherein at least the sense strand 5′ terminal and 3′ terminal nucleotides are base paired with nucleotides of antisense strand when sense and antisense strands are aligned for maximum complementarity, thereby forming a substantially duplexed region between sense and antisense strands; and antisense strand is sufficiently complementary to a target RNA along at least 19 ribonucleotides of antisense strand length to reduce target gene expression when said double stranded nucleic acid is introduced into a mammalian cell; and wherein the antisense strand contains at least one thermally destabilizing nucleotide, where at least one thermally destabilizing nucleotide is in the seed region of the antisense strand (i.e. at position 2-9 of the 5′-end of the antisense strand). For example, the thermally destabilizing nucleotide occurs between positions opposite or complimentary to positions 14-17 of the 5′-end of the sense strand, and wherein the dsRNA optionally further has at least one (e.g., one, two, three, four, five, six or all seven) of the following characteristics: (i) the antisense comprises 2, 3, 4, 5, or 6 2′-fluoro modifications; (ii) the antisense comprises 1, 2, 3, 4, or 5 phosphorothioate internucleotide linkages; (iii) the sense strand is conjugated with a ligand; (iv) the sense strand comprises 2, 3, 4, or 5 2′-fluoro modifications; (v) the sense strand comprises 1, 2, 3, 4, or 5 phosphorothioate internucleotide linkages; and (vi) the dsRNA comprises at least four 2′-fluoro modifications; and (vii) the dsRNA comprises a duplex region of 12-30 nucleotide pairs in length.

[0481] In some embodiments, the dsRNA molecule of the disclosure comprises a sense and antisense strands, wherein said dsRNA molecule comprises a sense strand having a length which is at least 25 and at most 29 nucleotides and an antisense strand having a length which is at most 30 nucleotides with the sense strand comprises a modified nucleotide that is susceptible to enzymatic degradation at position 11 from the 5′ end, wherein the 3′ end of said sense strand and the 5′ end of said antisense strand form a blunt end and said antisense strand is 1-4 nucleotides longer at its 3′ end than the sense strand, wherein the duplex region which is at least 25 nucleotides in length, and said antisense strand is sufficiently complementary to a target mRNA along at least 19 nt of said antisense strand length to reduce target gene expression when said dsRNA molecule is introduced into a mammalian cell, and wherein dicer cleavage of said dsRNA preferentially results in an siRNA comprising said 3′ end of said antisense strand, thereby reducing expression of the target gene in the mammal, wherein the antisense strand contains at least one thermally destabilizing nucleotide, where the at least one thermally destabilizing nucleotide is in the seed region of the antisense strand (i.e. at position 2-9 of the 5′-end of the antisense strand), and wherein the dsRNA optionally further has at least one (e.g., one, two, three, four, five, six or all seven) of the following characteristics: (i) the antisense comprises 2, 3, 4, 5, or 6 2′-fluoro modifications; (ii) the antisense comprises 1, 2, 3, 4, or 5 phosphorothioate internucleotide linkages; (iii) the sense strand is conjugated with a ligand; (iv) the sense strand comprises 2, 3, 4, or 5 2′-fluoro modifications; (v) the sense strand comprises 1, 2, 3, 4, or 5 phosphorothioate internucleotide linkages; and (vi) the dsRNA comprises at least four 2′-fluoro modifications; and (vii) the dsRNA has a duplex region of 12-29 nucleotide pairs in length.

[0482] In some embodiments, every nucleotide in the sense strand and antisense strand of the dsRNA molecule may be modified. Each nucleotide may be modified with the same or different modification which can include one or more alteration of one or both of the non-linking phosphate oxygens or of one or more of the linking phosphate oxygens; alteration of a constituent of the ribose sugar, e.g., of the 2′ hydroxyl on the ribose sugar; wholesale replacement of the phosphate moiety with “dephospho” linkers; modification or replacement of a naturally occurring base; and replacement or modification of the ribose-phosphate backbone.

[0483] As nucleic acids are polymers of subunits, many of the modifications occur at a position which is repeated within a nucleic acid, e.g., a modification of a base, or a phosphate moiety, or a non-linking O of a phosphate moiety. In some cases, the modification will occur at all of the subject positions in the nucleic acid but in many cases it will not. By way of example, a modification may only occur at a 3′ or 5′ terminal position, may only occur in a terminal region, e.g., at a position on a terminal nucleotide or in the last 2, 3, 4, 5, or 10 nucleotides of a strand. A modification may occur in a double strand region, a single strand region, or in both. A modification may occur only in the double strand region of an RNA or may only occur in a single strand region of an RNA. E.g., a phosphorothioate modification at a non-linking O position may only occur at one or both termini, may only occur in a terminal region, e.g., at a position on a terminal nucleotide or in the last 2, 3, 4, 5, or 10 nucleotides of a strand, or may occur in double strand and single strand regions, particularly at termini. The 5′ end or ends can be phosphorylated.

[0484] It may be possible, e.g., to enhance stability, to include particular bases in overhangs, or to include modified nucleotides or nucleotide surrogates, in single strand overhangs, e.g., in a 5′ or 3′ overhang, or in both. E.g., it can be desirable to include purine nucleotides in overhangs. In some embodiments all or some of the bases in a 3′ or 5′ overhang may be modified, e.g., with a modification described herein. Modifications can include, e.g., the use of modifications at the 2′ position of the ribose sugar with modifications that are known in the art, e.g., the use of deoxyribonucleotides, 2′-deoxy-2′-fluoro (2′-F) or 2′-O-methyl modified instead of the ribosugar of the nucleobase, and modifications in the phosphate group, e.g., phosphorothioate modifications. Overhangs need not be homologous with the target sequence.

[0485] In some embodiments, each residue of the sense strand and antisense strand is independently modified with LNA, HNA, CeNA, 2′-methoxyethyl, 2′-O-methyl, 2′-O-allyl, 2′-C-allyl, 2′-deoxy, or 2′-fluoro. The strands can contain more than one modification. In some embodiments, each residue of the sense strand and antisense strand is independently modified with 2′-O-methyl or 2′-fluoro. It is to be understood that these modifications are in addition to the at least one thermally destabilizing modification of the duplex present in the antisense strand.

[0486] At least two different modifications are typically present on the sense strand and antisense strand. Those two modifications may be the 2′-deoxy, 2′-O-methyl or 2′-fluoro modifications, acyclic nucleotides or others. In some embodiments, the sense strand and antisense strand each comprises two differently modified nucleotides selected from 2′-O-methyl or 2′-deoxy. In some embodiments, each residue of the sense strand and antisense strand is independently modified with 2′-O-methyl nucleotide, 2′-deoxy nucleotide, 2′-deoxy-2′-fluoro nucleotide, 2′-O—N-methylacetamido (2′-O-NMA) nucleotide, a 2′-O-dimethylaminoethoxyethyl (2′-O-DMAEOE) nucleotide, 2′-O-aminopropyl (2′-O-AP) nucleotide, or 2′-ara-F nucleotide. Again, it is to be understood that these modifications are in addition to the at least one thermally destabilizing modification of the duplex present in the antisense strand.

[0487] In some embodiments, the dsRNA molecule of the disclosure comprises modifications of an alternating pattern, particular in the B1, B2, B3, B1′, B2′, B3′, B4′ regions. The term “alternating motif” or “alternative pattern” as used herein refers to a motif having one or more modifications, each modification occurring on alternating nucleotides of one strand. The alternating nucleotide may refer to one per every other nucleotide or one per every three nucleotides, or a similar pattern. For example, if A, B and C each represent one type of modification to the nucleotide, the alternating motif can be “ABABABABABAB . . . ,” “AABBAABBAABB . . . ,” “AABAABAABAAB . . . ,” “AAABAAABAAAB . . . ,” “AAABBBAAABBB . . . ,” or “ABCABCABCABC . . . ,” etc.

The type of modifications contained in the alternating motif may be the same or different. For example, if A, B, C, D each represent one type of modification on the nucleotide, the alternating pattern, i.e., modifications on every other nucleotide, may be the same, but each of the sense strand or antisense strand can be selected from several possibilities of modifications within the alternating motif such as “ABABAB . . . ”, “ACACAC . . . ” “BDBDBD . . . ” or “CDCDCD . . . ,” etc.

[0488] In some embodiments, the dsRNA molecule of the disclosure comprises the modification pattern for the alternating motif on the sense strand relative to the modification pattern for the alternating motif on the antisense strand is shifted. The shift may be such that the modified group of nucleotides of the sense strand corresponds to a differently modified group of nucleotides of the antisense strand and vice versa. For example, the sense strand when paired with the antisense strand in the dsRNA duplex, the alternating motif in the sense strand may start with “ABABAB” from 5′-3′ of the strand and the alternating motif in the antisense strand may start with “BABABA” from 3′-5′ of the strand within the duplex region. As another example, the alternating motif in the sense strand may start with “AABBAABB” from 5′-3′ of the strand and the alternating motif in the antisense strand may start with “BBAABBAA” from 3′-5′ of the strand within the duplex region, so that there is a complete or partial shift of the modification patterns between the sense strand and the antisense strand.

[0489] The dsRNA molecule of the disclosure may further comprise at least one phosphorothioate or methylphosphonate internucleotide linkage. The phosphorothioate or methylphosphonate internucleotide linkage modification may occur on any nucleotide of the sense strand or antisense strand or both in any position of the strand. For instance, the internucleotide linkage modification may occur on every nucleotide on the sense strand or antisense strand; each internucleotide linkage modification may occur in an alternating pattern on the sense strand or antisense strand; or the sense strand or antisense strand comprises both internucleotide linkage modifications in an alternating pattern. The alternating pattern of the internucleotide linkage modification on the sense strand may be the same or different from the antisense strand, and the alternating pattern of the internucleotide linkage modification on the sense strand may have a shift relative to the alternating pattern of the internucleotide linkage modification on the antisense strand.

[0490] In some embodiments, the dsRNA molecule comprises the phosphorothioate or methylphosphonate internucleotide linkage modification in the overhang region. For example, the overhang region comprises two nucleotides having a phosphorothioate or methylphosphonate internucleotide linkage between the two nucleotides. Internucleotide linkage modifications also may be made to link the overhang nucleotides with the terminal paired nucleotides within duplex region. For example, at least 2, 3, 4, or all the overhang nucleotides may be linked through phosphorothioate or methylphosphonate internucleotide linkage, and optionally, there may be additional phosphorothioate or methylphosphonate internucleotide linkages linking the overhang nucleotide with a paired nucleotide that is next to the overhang nucleotide. For instance, there may be at least two phosphorothioate internucleotide linkages between the terminal three nucleotides, in which two of the three nucleotides are overhang nucleotides, and the third is a paired nucleotide next to the overhang nucleotide. Optionally, these terminal three nucleotides may be at the 3′-end of the antisense strand.

[0491] In some embodiments, the sense strand of the dsRNA molecule comprises 1-10 blocks of two to ten phosphorothioate or methylphosphonate internucleotide linkages separated by 1, 2, 3, 4, 5, 6, 7, 8, 9, 10, 11, 12, 13, 14, 15, or 16 phosphate internucleotide linkages, wherein one of the phosphorothioate or methylphosphonate internucleotide linkages is placed at any position in the oligonucleotide sequence and the said sense strand is paired with an antisense strand comprising any combination of phosphorothioate, methylphosphonate and phosphate internucleotide linkages or an antisense strand comprising either phosphorothioate or methylphosphonate or phosphate linkage.

[0492] In some embodiments, the antisense strand of the dsRNA molecule comprises two blocks of two phosphorothioate or methylphosphonate internucleotide linkages separated by 1, 2, 3, 4, 5, 6, 7, 8, 9, 10, 11, 12, 13, 14, 15, 16, 17, or 18 phosphate internucleotide linkages, wherein one of the phosphorothioate or methylphosphonate internucleotide linkages is placed at any position in the oligonucleotide sequence and the said antisense strand is paired with a sense strand comprising any combination of phosphorothioate, methylphosphonate and phosphate internucleotide linkages or an antisense strand comprising either phosphorothioate or methylphosphonate or phosphate linkage.

[0493] In some embodiments, the antisense strand of the dsRNA molecule comprises two blocks of three phosphorothioate or methylphosphonate internucleotide linkages separated by 1, 2, 3, 4, 5, 6, 7, 8, 9, 10, 11, 12, 13, 14, 15, or 16 phosphate internucleotide linkages, wherein one of the phosphorothioate or methylphosphonate internucleotide linkages is placed at any position in the oligonucleotide sequence and the said antisense strand is paired with a sense strand comprising any combination of phosphorothioate, methylphosphonate and phosphate internucleotide linkages or an antisense strand comprising either phosphorothioate or methylphosphonate or phosphate linkage.

[0494] In some embodiments, the antisense strand of the dsRNA molecule comprises two blocks of four phosphorothioate or methylphosphonate internucleotide linkages separated by 1, 2, 3, 4, 5, 6, 7, 8, 9, 10, 11, 12, 13, or 14 phosphate internucleotide linkages, wherein one of the phosphorothioate or methylphosphonate internucleotide linkages is placed at any position in the oligonucleotide sequence and the said antisense strand is paired with a sense strand comprising any combination of phosphorothioate, methylphosphonate and phosphate internucleotide linkages or an antisense strand comprising either phosphorothioate or methylphosphonate or phosphate linkage.

[0495] In some embodiments, the antisense strand of the dsRNA molecule comprises two blocks of five phosphorothioate or methylphosphonate internucleotide linkages separated by 1, 2, 3, 4, 5, 6, 7, 8, 9, 10, 11, or 12 phosphate internucleotide linkages, wherein one of the phosphorothioate or methylphosphonate internucleotide linkages is placed at any position in the oligonucleotide sequence and the said antisense strand is paired with a sense strand comprising any combination of phosphorothioate, methylphosphonate and phosphate internucleotide linkages or an antisense strand comprising either phosphorothioate or methylphosphonate or phosphate linkage.

[0496] In some embodiments, the antisense strand of the dsRNA molecule comprises two blocks of six phosphorothioate or methylphosphonate internucleotide linkages separated by 1, 2, 3, 4, 5, 6, 7, 8, 9, or 10 phosphate internucleotide linkages, wherein one of the phosphorothioate or methylphosphonate internucleotide linkages is placed at any position in the oligonucleotide sequence and the said antisense strand is paired with a sense strand comprising any combination of phosphorothioate, methylphosphonate and phosphate internucleotide linkages or an antisense strand comprising either phosphorothioate or methylphosphonate or phosphate linkage.

[0497] In some embodiments, the antisense strand of the dsRNA molecule comprises two blocks of seven phosphorothioate or methylphosphonate internucleotide linkages separated by 1, 2, 3, 4, 5, 6, 7, or 8 phosphate internucleotide linkages, wherein one of the phosphorothioate or methylphosphonate internucleotide linkages is placed at any position in the oligonucleotide sequence and the said antisense strand is paired with a sense strand comprising any combination of phosphorothioate, methylphosphonate and phosphate internucleotide linkages or an antisense strand comprising either phosphorothioate or methylphosphonate or phosphate linkage.

[0498] In some embodiments, the antisense strand of the dsRNA molecule comprises two blocks of eight phosphorothioate or methylphosphonate internucleotide linkages separated by 1, 2, 3, 4, 5, or 6 phosphate internucleotide linkages, wherein one of the phosphorothioate or methylphosphonate internucleotide linkages is placed at any position in the oligonucleotide sequence and the said antisense strand is paired with a sense strand comprising any combination of phosphorothioate, methylphosphonate and phosphate internucleotide linkages or an antisense strand comprising either phosphorothioate or methylphosphonate or phosphate linkage.

[0499] In some embodiments, the antisense strand of the dsRNA molecule comprises two blocks of nine phosphorothioate or methylphosphonate internucleotide linkages separated by 1, 2, 3, or 4 phosphate internucleotide linkages, wherein one of the phosphorothioate or methylphosphonate internucleotide linkages is placed at any position in the oligonucleotide sequence and the said antisense strand is paired with a sense strand comprising any combination of phosphorothioate, methylphosphonate and phosphate internucleotide linkages or an antisense strand comprising either phosphorothioate or methylphosphonate or phosphate linkage.

[0500] In some embodiments, the dsRNA molecule of the disclosure further comprises one or more phosphorothioate or methylphosphonate internucleotide linkage modification within 1-10 of the termini position(s) of the sense or antisense strand. For example, at least 2, 3, 4, 5, 6, 7, 8, 9, or 10 nucleotides may be linked through phosphorothioate or methylphosphonate internucleotide linkage at one end or both ends of the sense or antisense strand.

[0501] In some embodiments, the dsRNA molecule of the disclosure further comprises one or more phosphorothioate or methylphosphonate internucleotide linkage modification within 1-10 of the internal region of the duplex of each of the sense or antisense strand. For example, at least 2, 3, 4, 5, 6, 7, 8, 9, or 10 nucleotides may be linked through phosphorothioate methylphosphonate internucleotide linkage at position 8-16 of the duplex region counting from the 5′-end of the sense strand; the dsRNA molecule can optionally further comprise one or more phosphorothioate or methylphosphonate internucleotide linkage modification within 1-10 of the termini position(s).

[0502] In some embodiments, the dsRNA molecule of the disclosure further comprises one to five phosphorothioate or methylphosphonate internucleotide linkage modification(s) within position 1-5 and one to five phosphorothioate or methylphosphonate internucleotide linkage modification(s) within position 18-23 of the sense strand (counting from the 5′-end), and one to five phosphorothioate or methylphosphonate internucleotide linkage modification at positions 1 and 2 and one to five within positions 18-23 of the antisense strand (counting from the 5′-end).

[0503] In some embodiments, the dsRNA molecule of the disclosure further comprises one phosphorothioate internucleotide linkage modification within position 1-5 and one phosphorothioate or methylphosphonate internucleotide linkage modification within position 18-23 of the sense strand (counting from the 5′-end), and one phosphorothioate internucleotide linkage modification at positions 1 and 2 and two phosphorothioate or methylphosphonate internucleotide linkage modifications within positions 18-23 of the antisense strand (counting from the 5′-end).

[0504] In some embodiments, the dsRNA molecule of the disclosure further comprises two phosphorothioate internucleotide linkage modifications within position 1-5 and one phosphorothioate internucleotide linkage modification within position 18-23 of the sense strand (counting from the 5′-end), and one phosphorothioate internucleotide linkage modification at positions 1 and 2 and two phosphorothioate internucleotide linkage modifications within positions 18-23 of the antisense strand (counting from the 5′-end).

[0505] In some embodiments, the dsRNA molecule of the disclosure further comprises two phosphorothioate internucleotide linkage modifications within position 1-5 and two phosphorothioate internucleotide linkage modifications within position 18-23 of the sense strand (counting from the 5′-end), and one phosphorothioate internucleotide linkage modification at positions 1 and 2 and two phosphorothioate internucleotide linkage modifications within positions 18-23 of the antisense strand (counting from the 5′-end).

[0506] In some embodiments, the dsRNA molecule of the disclosure further comprises two phosphorothioate internucleotide linkage modifications within position 1-5 and two phosphorothioate internucleotide linkage modifications within position 18-23 of the sense strand (counting from the 5′-end), and one phosphorothioate internucleotide linkage modification at positions 1 and 2 and one phosphorothioate internucleotide linkage modification within positions 18-23 of the antisense strand (counting from the 5′-end).

[0507] In some embodiments, the dsRNA molecule of the disclosure further comprises one phosphorothioate internucleotide linkage modification within position 1-5 and one phosphorothioate internucleotide linkage modification within position 18-23 of the sense strand (counting from the 5′-end), and two phosphorothioate internucleotide linkage modifications at positions 1 and 2 and two phosphorothioate internucleotide linkage modifications within positions 18-23 of the antisense strand (counting from the 5′-end).

[0508] In some embodiments, the dsRNA molecule of the disclosure further comprises one phosphorothioate internucleotide linkage modification within position 1-5 and one within position 18-23 of the sense strand (counting from the 5′-end), and two phosphorothioate internucleotide linkage modification at positions 1 and 2 and one phosphorothioate internucleotide linkage modification within positions 18-23 of the antisense strand (counting from the 5′-end).

[0509] In some embodiments, the dsRNA molecule of the disclosure further comprises one phosphorothioate internucleotide linkage modification within position 1-5 (counting from the 5′-end) of the sense strand, and two phosphorothioate internucleotide linkage modifications at positions 1 and 2 and one phosphorothioate internucleotide linkage modification within positions 18-23 of the antisense strand (counting from the 5′-end).

[0510] In some embodiments, the dsRNA molecule of the disclosure further comprises two phosphorothioate internucleotide linkage modifications within position 1-5 (counting from the 5′-end) of the sense strand, and one phosphorothioate internucleotide linkage modification at positions 1 and 2 and two phosphorothioate internucleotide linkage modifications within positions 18-23 of the antisense strand (counting from the 5′-end).

[0511] In some embodiments, the dsRNA molecule of the disclosure further comprises two phosphorothioate internucleotide linkage modifications within position 1-5 and one within position 18-23 of the sense strand (counting from the 5′-end), and two phosphorothioate internucleotide linkage modifications at positions 1 and 2 and one phosphorothioate internucleotide linkage modification within positions 18-23 of the antisense strand (counting from the 5′-end).

[0512] In some embodiments, the dsRNA molecule of the disclosure further comprises two phosphorothioate internucleotide linkage modifications within position 1-5 and one phosphorothioate internucleotide linkage modification within position 18-23 of the sense strand (counting from the 5′-end), and two phosphorothioate internucleotide linkage modifications at positions 1 and 2 and two phosphorothioate internucleotide linkage modifications within positions 18-23 of the antisense strand (counting from the 5′-end).

[0513] In some embodiments, the dsRNA molecule of the disclosure further comprises two phosphorothioate internucleotide linkage modifications within position 1-5 and one phosphorothioate internucleotide linkage modification within position 18-23 of the sense strand (counting from the 5′-end), and one phosphorothioate internucleotide linkage modification at positions 1 and 2 and two phosphorothioate internucleotide linkage modifications within positions 18-23 of the antisense strand (counting from the 5′-end).

[0514] In some embodiments, the dsRNA molecule of the disclosure further comprises two phosphorothioate internucleotide linkage modifications at position 1 and 2, and two phosphorothioate internucleotide linkage modifications at position 20 and 21 of the sense strand (counting from the 5′-end), and one phosphorothioate internucleotide linkage modification at positions 1 and one at position 21 of the antisense strand (counting from the 5′-end).

[0515] In some embodiments, the dsRNA molecule of the disclosure further comprises one phosphorothioate internucleotide linkage modification at position 1, and one phosphorothioate internucleotide linkage modification at position 21 of the sense strand (counting from the 5′-end), and two phosphorothioate internucleotide linkage modifications at positions 1 and 2 and two phosphorothioate internucleotide linkage modifications at positions 20 and 21 the antisense strand (counting from the 5′-end).

[0516] In some embodiments, the dsRNA molecule of the disclosure further comprises two phosphorothioate internucleotide linkage modifications at position 1 and 2, and two phosphorothioate internucleotide linkage modifications at position 21 and 22 of the sense strand (counting from the 5′-end), and one phosphorothioate internucleotide linkage modification at positions 1 and one phosphorothioate internucleotide linkage modification at position 21 of the antisense strand (counting from the 5′-end).

[0517] In some embodiments, the dsRNA molecule of the disclosure further comprises one phosphorothioate internucleotide linkage modification at position 1, and one phosphorothioate internucleotide linkage modification at position 21 of the sense strand (counting from the 5′-end), and two phosphorothioate internucleotide linkage modifications at positions 1 and 2 and two phosphorothioate internucleotide linkage modifications at positions 21 and 22 the antisense strand (counting from the 5′-end).

[0518] In some embodiments, the dsRNA molecule of the disclosure further comprises two phosphorothioate internucleotide linkage modifications at position 1 and 2, and two phosphorothioate internucleotide linkage modifications at position 22 and 23 of the sense strand (counting from the 5′-end), and one phosphorothioate internucleotide linkage modification at positions 1 and one phosphorothioate internucleotide linkage modification at position 21 of the antisense strand (counting from the 5′-end).

[0519] In some embodiments, the dsRNA molecule of the disclosure further comprises one phosphorothioate internucleotide linkage modification at position 1, and one phosphorothioate internucleotide linkage modification at position 21 of the sense strand (counting from the 5′-end), and two phosphorothioate internucleotide linkage modifications at positions 1 and 2 and two phosphorothioate internucleotide linkage modifications at positions 23 and 23 the antisense strand (counting from the 5′-end).

[0520] In some embodiments, compound of the disclosure comprises a pattern of backbone chiral centers. In some embodiments, a common pattern of backbone chiral centers comprises at least 5 internucleotidic linkages in the Sp configuration. In some embodiments, a common pattern of backbone chiral centers comprises at least 6 internucleotidic linkages in the Sp configuration. In some embodiments, a common pattern of backbone chiral centers comprises at least 7 internucleotidic linkages in the Sp configuration. In some embodiments, a common pattern of backbone chiral centers comprises at least 8 internucleotidic linkages in the Sp configuration. In some embodiments, a common pattern of backbone chiral centers comprises at least 9 internucleotidic linkages in the Sp configuration. In some embodiments, a common pattern of backbone chiral centers comprises at least 10 internucleotidic linkages in the Sp configuration. In some embodiments, a common pattern of backbone chiral centers comprises at least 11 internucleotidic linkages in the Sp configuration. In some embodiments, a common pattern of backbone chiral centers comprises at least 12 internucleotidic linkages in the Sp configuration. In some embodiments, a common pattern of backbone chiral centers comprises at least 13 internucleotidic linkages in the Sp configuration. In some embodiments, a common pattern of backbone chiral centers comprises at least 14 internucleotidic linkages in the Sp configuration. In some embodiments, a common pattern of backbone chiral centers comprises at least 15 internucleotidic linkages in the Sp configuration. In some embodiments, a common pattern of backbone chiral centers comprises at least 16 internucleotidic linkages in the Sp configuration. In some embodiments, a common pattern of backbone chiral centers comprises at least 17 internucleotidic linkages in the Sp configuration. In some embodiments, a common pattern of backbone chiral centers comprises at least 18 internucleotidic linkages in the Sp configuration. In some embodiments, a common pattern of backbone chiral centers comprises at least 19 internucleotidic linkages in the Sp configuration. In some embodiments, a common pattern of backbone chiral centers comprises no more than 8 internucleotidic linkages in the Rp configuration. In some embodiments, a common pattern of backbone chiral centers comprises no more than 7 internucleotidic linkages in the Rp configuration. In some embodiments, a common pattern of backbone chiral centers comprises no more than 6 internucleotidic linkages in the Rp configuration. In some embodiments, a common pattern of backbone chiral centers comprises no more than 5 internucleotidic linkages in the Rp configuration. In some embodiments, a common pattern of backbone chiral centers comprises no more than 4 internucleotidic linkages in the Rp configuration. In some embodiments, a common pattern of backbone chiral centers comprises no more than 3 internucleotidic linkages in the Rp configuration. In some embodiments, a common pattern of backbone chiral centers comprises no more than 2 internucleotidic linkages in the Rp configuration. In some embodiments, a common pattern of backbone chiral centers comprises no more than 1 internucleotidic linkages in the Rp configuration. In some embodiments, a common pattern of backbone chiral centers comprises no more than 8 internucleotidic linkages which are not chiral (as a non-limiting example, a phosphodiester). In some embodiments, a common pattern of backbone chiral centers comprises no more than 7 internucleotidic linkages which are not chiral. In some embodiments, a common pattern of backbone chiral centers comprises no more than 6 internucleotidic linkages which are not chiral. In some embodiments, a common pattern of backbone chiral centers comprises no more than 5 internucleotidic linkages which are not chiral. In some embodiments, a common pattern of backbone chiral centers comprises no more than 4 internucleotidic linkages which are not chiral. In some embodiments, a common pattern of backbone chiral centers comprises no more than 3 internucleotidic linkages which are not chiral. In some embodiments, a common pattern of backbone chiral centers comprises no more than 2 internucleotidic linkages which are not chiral. In some embodiments, a common pattern of backbone chiral centers comprises no more than 1 internucleotidic linkages which are not chiral. In some embodiments, a common pattern of backbone chiral centers comprises at least 10 internucleotidic linkages in the Sp configuration, and no more than 8 internucleotidic linkages which are not chiral. In some embodiments, a common pattern of backbone chiral centers comprises at least 11 internucleotidic linkages in the Sp configuration, and no more than 7 internucleotidic linkages which are not chiral. In some embodiments, a common pattern of backbone chiral centers comprises at least 12 internucleotidic linkages in the Sp configuration, and no more than 6 internucleotidic linkages which are not chiral. In some embodiments, a common pattern of backbone chiral centers comprises at least 13 internucleotidic linkages in the Sp configuration, and no more than 6 internucleotidic linkages which are not chiral. In some embodiments, a common pattern of backbone chiral centers comprises at least 14 internucleotidic linkages in the Sp configuration, and no more than 5 internucleotidic linkages which are not chiral. In some embodiments, a common pattern of backbone chiral centers comprises at least 15 internucleotidic linkages in the Sp configuration, and no more than 4 internucleotidic linkages which are not chiral. In some embodiments, the internucleotidic linkages in the Sp configuration are optionally contiguous or not contiguous. In some embodiments, the internucleotidic linkages in the Rp configuration are optionally contiguous or not contiguous. In some embodiments, the internucleotidic linkages which are not chiral are optionally contiguous or not contiguous.

[0521] In some embodiments, compound of the disclosure comprises a block is a stereochemistry block. In some embodiments, a block is an Rp block in that each internucleotidic linkage of the block is Rp. In some embodiments, a 5′-block is an Rp block. In some embodiments, a 3′-block is an Rp block. In some embodiments, a block is an Sp block in that each internucleotidic linkage of the block is Sp. In some embodiments, a 5′-block is an Sp block. In some embodiments, a 3′-block is an Sp block. In some embodiments, provided oligonucleotides comprise both Rp and Sp blocks. In some embodiments, provided oligonucleotides comprise one or more Rp but no Sp blocks. In some embodiments, provided oligonucleotides comprise one or more Sp but no Rp blocks. In some embodiments, provided oligonucleotides comprise one or more PO blocks wherein each internucleotidic linkage in a natural phosphate linkage.

[0522] In some embodiments, compound of the disclosure comprises a 5′-block is an Sp block wherein each sugar moiety comprises a 2′-F modification. In some embodiments, a 5′-block is an Sp block wherein each of internucleotidic linkage is a modified internucleotidic linkage and each sugar moiety comprises a 2′-F modification. In some embodiments, a 5′-block is an Sp block wherein each of internucleotidic linkage is a phosphorothioate linkage and each sugar moiety comprises a 2′-F modification. In some embodiments, a 5′-block comprises 4 or more nucleoside units. In some embodiments, a 5′-block comprises 5 or more nucleoside units. In some embodiments, a 5′-block comprises 6 or more nucleoside units. In some embodiments, a 5′-block comprises 7 or more nucleoside units. In some embodiments, a 3′-block is an Sp block wherein each sugar moiety comprises a 2′-F modification. In some embodiments, a 3′-block is an Sp block wherein each of internucleotidic linkage is a modified internucleotidic linkage and each sugar moiety comprises a 2′-F modification. In some embodiments, a 3′-block is an Sp block wherein each of internucleotidic linkage is a phosphorothioate linkage and each sugar moiety comprises a 2′-F modification. In some embodiments, a 3′-block comprises 4 or more nucleoside units. In some embodiments, a 3′-block comprises 5 or more nucleoside units. In some embodiments, a 3′-block comprises 6 or more nucleoside units. In some embodiments, a 3′-block comprises 7 or more nucleoside units.

[0523] In some embodiments, compound of the disclosure comprises a type of nucleoside in a region or an oligonucleotide is followed by a specific type of internucleotidic linkage, e.g., natural phosphate linkage, modified internucleotidic linkage, Rp chiral internucleotidic linkage, Sp chiral internucleotidic linkage, etc. In some embodiments, A is followed by Sp. In some embodiments, A is followed by Rp. In some embodiments, A is followed by natural phosphate linkage (PO). In some embodiments, U is followed by Sp. In some embodiments, U is followed by Rp. In some embodiments, U is followed by natural phosphate linkage (PO). In some embodiments, C is followed by Sp. In some embodiments, C is followed by Rp. In some embodiments, C is followed by natural phosphate linkage (PO). In some embodiments, G is followed by Sp. In some embodiments, G is followed by Rp. In some embodiments, G is followed by natural phosphate linkage (PO). In some embodiments, C and U are followed by Sp. In some embodiments, C and U are followed by Rp. In some embodiments, C and U are followed by natural phosphate linkage (PO). In some embodiments, A and G are followed by Sp. In some embodiments, A and G are followed by Rp.

[0524] In some embodiments, the antisense strand comprises phosphorothioate internucleotide linkages between nucleotide positions 21 and 22, and between nucleotide positions 22 and 23, wherein the antisense strand contains at least one thermally destabilizing modification of the duplex located in the seed region of the antisense strand (i.e., at position 2-9 of the 5′-end of the antisense strand), and wherein the dsRNA optionally further has at least one (e.g., one, two, three, four, five, six, seven or all eight) of the following characteristics: (i) the antisense comprises 2, 3, 4, 5 or 6 2′-fluoro modifications; (ii) the antisense comprises 3, 4 or 5 phosphorothioate internucleotide linkages; (iii) the sense strand is conjugated with a ligand; (iv) the sense strand comprises 2, 3, 4 or 5 2′-fluoro modifications; (v) the sense strand comprises 1, 2, 3, 4 or 5 phosphorothioate internucleotide linkages; (vi) the dsRNA comprises at least four 2′-fluoro modifications; (vii) the dsRNA comprises a duplex region of 12-40 nucleotide pairs in length; and (viii) the dsRNA has a blunt end at 5′-end of the antisense strand.

[0525] In some embodiments, the antisense strand comprises phosphorothioate internucleotide linkages between nucleotide positions 1 and 2, between nucleotide positions 2 and 3, between nucleotide positions 21 and 22, and between nucleotide positions 22 and 23, wherein the antisense strand contains at least one thermally destabilizing modification of the duplex located in the seed region of the antisense strand (i.e., at position 2-9 of the 5′-end of the antisense strand), and wherein the dsRNA optionally further has at least one (e.g., one, two, three, four, five, six, seven or all eight) of the following characteristics: (i) the antisense comprises 2, 3, 4, 5 or 6 2′-fluoro modifications; (ii) the sense strand is conjugated with a ligand; (iii) the sense strand comprises 2, 3, 4 or 5 2′-fluoro modifications; (iv) the sense strand comprises 1, 2, 3, 4 or 5 phosphorothioate internucleotide linkages; (v) the dsRNA comprises at least four 2′-fluoro modifications; (vi) the dsRNA comprises a duplex region of 12-40 nucleotide pairs in length; (vii) the dsRNA comprises a duplex region of 12-40 nucleotide pairs in length; and (viii) the dsRNA has a blunt end at 5′-end of the antisense strand.

[0526] In some embodiments, the sense strand comprises phosphorothioate internucleotide linkages between nucleotide positions 1 and 2, and between nucleotide positions 2 and 3, wherein the antisense strand contains at least one thermally destabilizing modification of the duplex located in the seed region of the antisense strand (i.e., at position 2-9 of the 5′-end of the antisense strand), and wherein the dsRNA optionally further has at least one (e.g., one, two, three, four, five, six, seven or all eight) of the following characteristics: (i) the antisense comprises 2, 3, 4, 5 or 6 2′-fluoro modifications; (ii) the antisense comprises 1, 2, 3, 4 or 5 phosphorothioate internucleotide linkages; (iii) the sense strand is conjugated with a ligand; (iv) the sense strand comprises 2, 3, 4 or 5 2′-fluoro modifications; (v) the sense strand comprises 3, 4 or 5 phosphorothioate internucleotide linkages; (vi) the dsRNA comprises at least four 2′-fluoro modifications; (vii) the dsRNA comprises a duplex region of 12-40 nucleotide pairs in length; and (viii) the dsRNA has a blunt end at 5′-end of the antisense strand.

[0527] In some embodiments, the sense strand comprises phosphorothioate internucleotide linkages between nucleotide positions 1 and 2, and between nucleotide positions 2 and 3, the antisense strand comprises phosphorothioate internucleotide linkages between nucleotide positions 1 and 2, between nucleotide positions 2 and 3, between nucleotide positions 21 and 22, and between nucleotide positions 22 and 23, wherein the antisense strand contains at least one thermally destabilizing modification of the duplex located in the seed region of the antisense strand (i.e., at position 2-9 of the 5′-end of the antisense strand), and wherein the dsRNA optionally further has at least one (e.g., one, two, three, four, five, six or all seven) of the following characteristics: (i) the antisense comprises 2, 3, 4, 5 or 6 2′-fluoro modifications; (ii) the sense strand is conjugated with a ligand; (iii) the sense strand comprises 2, 3, 4 or 5 2′-fluoro modifications; (iv) the sense strand comprises 3, 4 or 5 phosphorothioate internucleotide linkages; (v) the dsRNA comprises at least four 2′-fluoro modifications; (vi) the dsRNA comprises a duplex region of 12-40 nucleotide pairs in length; and (vii) the dsRNA has a blunt end at 5′-end of the antisense strand.

[0528] In some embodiments, the dsRNA molecule of the disclosure comprises mismatch(es) with the target, within the duplex, or combinations thereof. The mismatch can occur in the overhang region or the duplex region. The base pair can be ranked on the basis of their propensity to promote dissociation or melting (e.g., on the free energy of association or dissociation of a particular pairing, the simplest approach is to examine the pairs on an individual pair basis, though next neighbor or similar analysis can also be used). In terms of promoting dissociation: A:U is preferred over G:C; G:U is preferred over G:C; and I:C is preferred over G:C (I=inosine). Mismatches, e.g., non-canonical or other than canonical pairings (as described elsewhere herein) are preferred over canonical (A:T, A:U, G:C) pairings; and pairings which include a universal base are preferred over canonical pairings.

[0529] In some embodiments, the dsRNA molecule of the disclosure comprises at least one of the first 1, 2, 3, 4, or 5 base pairs within the duplex regions from the 5′- end of the antisense strand can be chosen independently from the group of: A:U, G:U, I:C, and mismatched pairs, e.g., non-canonical or other than canonical pairings or pairings which include a universal base, to promote the dissociation of the antisense strand at the 5′-end of the duplex.

[0530] In some embodiments, the nucleotide at the 1 position within the duplex region from the 5′-end in the antisense strand is selected from the group consisting of A, dA, dU, U, and dT. Alternatively, at least one of the first 1, 2 or 3 base pair within the duplex region from the 5′- end of the antisense strand is an AU base pair. For example, the first base pair within the duplex region from the 5′- end of the antisense strand is an AU base pair.

[0531] It was found that introducing 4′-modified or 5′-modified nucleotide to the 3′-end of a phosphodiester (PO), phosphorothioate (PS), or phosphorodithioate (PS2) linkage of a dinucleotide at any position of single stranded or double stranded oligonucleotide can exert steric effect to the internucleotide linkage and, hence, protecting or stabilizing it against nucleases.

[0532] In some embodiments, 5′-modified nucleoside is introduced at the 3′-end of a dinucleotide at any position of single stranded or double stranded siRNA. For instance, a 5′-alkylated nucleoside may be introduced at the 3′-end of a dinucleotide at any position of single stranded or double stranded siRNA. The alkyl group at the 5′ position of the ribose sugar can be racemic or chirally pure R or S isomer. An exemplary 5′-alkylated nucleoside is 5′-methyl nucleoside. The 5′-methyl can be either racemic or chirally pure R or S isomer.

[0533] In some embodiments, 4′-modified nucleoside is introduced at the 3′-end of a dinucleotide at any position of single stranded or double stranded siRNA. For instance, a 4′-alkylated nucleoside may be introduced at the 3′-end of a dinucleotide at any position of single stranded or double stranded siRNA. The alkyl group at the 4′ position of the ribose sugar can be racemic or chirally pure R or S isomer. An exemplary 4′-alkylated nucleoside is 4′-methyl nucleoside. The 4′-methyl can be either racemic or chirally pure R or S isomer. Alternatively, a 4′-O-alkylated nucleoside may be introduced at the 3′-end of a dinucleotide at any position of single stranded or double stranded siRNA. The 4′-O-alkyl of the ribose sugar can be racemic or chirally pure R or S isomer. An exemplary 4′-O-alkylated nucleoside is 4′-O-methyl nucleoside. The 4′-O-methyl can be either racemic or chirally pure R or S isomer.

[0534] In some embodiments, 5′-alkylated nucleoside is introduced at any position on the sense strand or antisense strand of a dsRNA, and such modification maintains or improves potency of the dsRNA. The 5′-alkyl can be either racemic or chirally pure R or S isomer. An exemplary 5′-alkylated nucleoside is 5′-methyl nucleoside. The 5′-methyl can be either racemic or chirally pure R or S isomer.

[0535] In some embodiments, 4′-alkylated nucleoside is introduced at any position on the sense strand or antisense strand of a dsRNA, and such modification maintains or improves potency of the dsRNA. The 4′-alkyl can be either racemic or chirally pure R or S isomer. An exemplary 4′-alkylated nucleoside is 4′-methyl nucleoside. The 4′-methyl can be either racemic or chirally pure R or S isomer.

[0536] In some embodiments, 4′-O-alkylated nucleoside is introduced at any position on the sense strand or antisense strand of a dsRNA, and such modification maintains or improves potency of the dsRNA. The 5′-alkyl can be either racemic or chirally pure R or S isomer. An exemplary 4′-O-alkylated nucleoside is 4′-O-methyl nucleoside. The 4′-O-methyl can be either racemic or chirally pure R or S isomer.

[0537] In some embodiments, the dsRNA molecule of the disclosure can comprise 2′-5′ linkages (with 2′-H, 2′-OH and 2′-OMe and with P═O or P═S). For example, the 2′-5′ linkages modifications can be used to promote nuclease resistance or to inhibit binding of the sense to the antisense strand, or can be used at the 5′ end of the sense strand to avoid sense strand activation by RISC.

[0538] In another embodiment, the dsRNA molecule of the disclosure can comprise L sugars (e.g., L ribose, L-arabinose with 2′-H, 2′-OH and 2′-OMe). For example, these L sugars modifications can be used to promote nuclease resistance or to inhibit binding of the sense to the antisense strand, or can be used at the 5′ end of the sense strand to avoid sense strand activation by RISC.

[0539] Various publications describe multimeric siRNA which can all be used with the dsRNA of the disclosure. Such publications include WO2007/091269, U.S. Pat. No. 7,858,769, WO2010/141511, WO2007/117686, WO2009/014887, and WO2011/031520 which are hereby incorporated by their entirely.

[0540] As described in more detail below, the RNAi agent that contains conjugations of one or more carbohydrate moieties to an RNAi agent can optimize one or more properties of the RNAi agent. In many cases, the carbohydrate moiety will be attached to a modified subunit of the RNAi agent. For example, the ribose sugar of one or more ribonucleotide subunits of a dsRNA agent can be replaced with another moiety, e.g., a non-carbohydrate (optionally cyclic) carrier to which is attached a carbohydrate ligand. A ribonucleotide subunit in which the ribose sugar of the subunit has been so replaced is referred to herein as a ribose replacement modification subunit (RRMS). A cyclic carrier may be a carbocyclic ring system, i.e., all ring atoms are carbon atoms, or a heterocyclic ring system, i.e., one or more ring atoms may be a heteroatom, e.g., nitrogen, oxygen, sulfur. The cyclic carrier may be a monocyclic ring system, or may contain two or more rings, e.g. fused rings. The cyclic carrier may be a fully saturated ring system, or it may contain one or more double bonds.

[0541] The ligand may be attached to the polynucleotide via a carrier. The carriers include (i) at least one “backbone attachment point,” optionally two “backbone attachment points” and (ii) at least one “tethering attachment point.” A “backbone attachment point” as used herein refers to a functional group, e.g. a hydroxyl group, or generally, a bond available for, and that is suitable for incorporation of the carrier into the backbone, e.g., the phosphate, or modified phosphate, e.g., sulfur containing, backbone, of a ribonucleic acid. A “tethering attachment point” (TAP) in some embodiments refers to a constituent ring atom of the cyclic carrier, e.g., a carbon atom or a heteroatom (distinct from an atom which provides a backbone attachment point), that connects a selected moiety. The moiety can be, e.g., a carbohydrate, e.g. monosaccharide, disaccharide, trisaccharide, tetrasaccharide, oligosaccharide and polysaccharide. Optionally, the selected moiety is connected by an intervening tether to the cyclic carrier. Thus, the cyclic carrier will often include a functional group, e.g., an amino group, or generally, provide a bond, that is suitable for incorporation or tethering of another chemical entity, e.g., a ligand to the constituent ring.

[0542] The RNAi agents may be conjugated to a ligand via a carrier, wherein the carrier can be a cyclic group or an acyclic group. Optionally, the cyclic group is selected from pyrrolidinyl, pyrazolinyl, pyrazolidinyl, imidazolinyl, imidazolidinyl, piperidinyl, piperazinyl, [1,3]dioxolane, oxazolidinyl, isoxazolidinyl, morpholinyl, thiazolidinyl, isothiazolidinyl, quinoxalinyl, pyridazinonyl, tetrahydrofuryl and decalin. Optionally, the acyclic group is selected from serinol backbone and diethanolamine backbone.

[0543] In certain specific embodiments, the RNAi agent for use in the methods of the disclosure is an agent selected from the group of agents listed in any one of Tables 2, 3, 5, 6, 9 or 10. These agents may further comprise a ligand, such as one or more lipophilic moieties, one or more GalNAc derivatives, or both of one of more lipophilic moieties and one or more GalNAc derivatives.

### III. iRNAs Conjugated to Ligands

[0544] Another modification of the RNA of an iRNA of the disclosure involves chemically linking to the iRNA one or more ligands, moieties or conjugates that enhance the activity, cellular distribution or cellular uptake of the iRNA, e.g., into a cell. Such moieties include but are not limited to lipid moieties such as a cholesterol moiety (Letsinger et al., Proc. Natl. Acid. Sci. USA, 1989, 86: 6553-6556), cholic acid (Manoharan et al., Biorg. Med. Chem. Let., 1994, 4: 1053-1060), a thioether, e.g., beryl-S-tritylthiol (Manoharan et al., Ann. N.Y. Acad. Sci., 1992, 660: 306-309; Manoharan et al., Biorg. Med. Chem. Let., 1993, 3: 2765-2770), a thiocholesterol (Oberhauser et al., Nucl. Acids Res., 1992, 20: 533-538), an aliphatic chain, e.g., dodecandiol or undecyl residues (Saison-Behmoaras et al., EMBO J, 1991, 10: 1111-1118; Kabanov et al., FEBS Lett., 1990, 259: 327-330; Svinarchuk et al., Biochimie, 1993, 75: 49-54), a phospholipid, e.g., di-hexadecyl-rac-glycerol or triethyl-ammonium 1,2-di-O-hexadecyl-rac-glycero-3-phosphonate (Manoharan et al., Tetrahedron Lett., 1995, 36: 3651-3654; Shea et al., Nucl. Acids Res., 1990, 18: 3777-3783), a polyamine or a polyethylene glycol chain (Manoharan et al., Nucleosides & Nucleotides, 1995, 14: 969-973), or adamantane acetic acid (Manoharan et al., Tetrahedron Lett., 1995, 36: 3651-3654), a palmityl moiety (Mishra et al., Biochim. Biophys. Acta, 1995, 1264: 229-237), or an octadecylamine or hexylamino-carbonyloxycholesterol moiety (Crooke et al., J. Pharmacol. Exp. Ther., 1996, 277: 923-937).

[0545] In certain embodiments, a ligand alters the distribution, targeting or lifetime of an iRNA agent into which it is incorporated. In some embodiments, a ligand provides an enhanced affinity for a selected target, e.g., molecule, cell or cell type, compartment, e.g., a cellular or organ compartment, tissue, organ or region of the body, as, e.g., compared to a species absent such a ligand. Typical ligands will not take part in duplex pairing in a duplexed nucleic acid.

[0546] Ligands can include a naturally occurring substance, such as a protein (e.g., human serum albumin (HSA), low-density lipoprotein (LDL), or globulin); carbohydrate (e.g., a dextran, pullulan, chitin, chitosan, inulin, cyclodextrin or hyaluronic acid); or a lipid. The ligand may also be a recombinant or synthetic molecule, such as a synthetic polymer, e.g., a synthetic polyamino acid. Examples of polyamino acids include polyamino acid is a polylysine (PLL), poly L-aspartic acid, poly L-glutamic acid, styrene-maleic acid anhydride copolymer, poly(L-lactide-co-glycolied) copolymer, divinyl ether-maleic anhydride copolymer, N-(2-hydroxypropyl)methacrylamide copolymer (HMPA), polyethylene glycol (PEG), polyvinyl alcohol (PVA), polyurethane, poly(2-ethylacryllic acid), N-isopropylacrylamide polymers, or polyphosphazine. Example of polyamines include: polyethylenimine, polylysine (PLL), spermine, spermidine, polyamine, pseudopeptide-polyamine, peptidomimetic polyamine, dendrimer polyamine, arginine, amidine, protamine, cationic lipid, cationic porphyrin, quaternary salt of a polyamine, or an α helical peptide.

[0547] Ligands can also include targeting groups, e.g., a cell or tissue targeting agent, e.g., a lectin, glycoprotein, lipid or protein, e.g., an antibody, that binds to a specified cell type such as a kidney cell. A targeting group can be a thyrotropin, melanotropin, lectin, glycoprotein, surfactant protein A, Mucin carbohydrate, multivalent lactose, multivalent galactose, N-acetyl-galactosamine, N-acetyl-glucosamine multivalent mannose, multivalent fucose, glycosylated polyaminoacids, multivalent galactose, transferrin, bisphosphonate, polyglutamate, polyaspartate, a lipid, cholesterol, a steroid, bile acid, folate, vitamin B12, biotin, or an RGD peptide or RGD peptide mimetic. In certain embodiments, the ligand is a multivalent galactose, e.g., an N-acetyl-galactosamine.

[0548] Other examples of ligands include dyes, intercalating agents (e.g. acridines), cross-linkers (e.g. psoralene, mitomycin C), porphyrins (TPPC4, texaphyrin, Sapphyrin), polycyclic aromatic hydrocarbons (e.g., phenazine, dihydrophenazine), artificial endonucleases (e.g. EDTA), lipophilic molecules, e.g., cholesterol, cholic acid, adamantane acetic acid, 1-pyrene butyric acid, dihydrotestosterone, 1,3-Bis-O(hexadecyl)glycerol, geranyloxyhexyl group, hexadecylglycerol, borneol, menthol, 1,3-propanediol, heptadecyl group, palmitic acid, myristic acid,O3-(oleoyl)lithocholic acid, 03-(oleoyl)cholenic acid, dimethoxytrityl, or phenoxazine) and peptide conjugates (e.g., antennapedia peptide, Tat peptide), alkylating agents, phosphate, amino, mercapto, PEG (e.g., PEG-40K), MPEG, [MPEG]2, polyamino, alkyl, substituted alkyl, radiolabeled markers, enzymes, haptens (e.g. biotin), transport/absorption facilitators (e.g., aspirin, vitamin E, folic acid), synthetic ribonucleases (e.g., imidazole, bisimidazole, histamine, imidazole clusters, acridine-imidazole conjugates, Eu3+ complexes of tetraazamacrocycles), dinitrophenyl, HRP, or AP.

[0549] Ligands can be proteins, e.g., glycoproteins, or peptides, e.g., molecules having a specific affinity for a co-ligand, or antibodies e.g., an antibody, that binds to a specified cell type such as a cancer cell, endothelial cell, or bone cell. Ligands may also include hormones and hormone receptors. They can also include non-peptidic species, such as lipids, lectins, carbohydrates, vitamins, cofactors, multivalent lactose, multivalent galactose, N-acetyl-galactosamine, N-acetyl-glucosamine multivalent mannose, or multivalent fucose. The ligand can be, for example, a lipopolysaccharide, an activator of p38 MAP kinase, or an activator of NF-κB.

[0550] The ligand can be a substance, e.g., a drug, which can increase the uptake of the iRNA agent into the cell, for example, by disrupting the cell's cytoskeleton, e.g., by disrupting the cell's microtubules, microfilaments, or intermediate filaments. The drug can be, for example, taxon, vincristine, vinblastine, cytochalasin, nocodazole, japlakinolide, latrunculin A, phalloidin, swinholide A, indanocine, or myoservin.

[0551] In some embodiments, a ligand attached to an iRNA as described herein acts as a pharmacokinetic modulator (PK modulator). PK modulators include lipophiles, bile acids, steroids, phospholipid analogues, peptides, protein binding agents, PEG, vitamins etc. Exemplary PK modulators include, but are not limited to, cholesterol, fatty acids, cholic acid, lithocholic acid, dialkylglycerides, diacylglyceride, phospholipids, sphingolipids, naproxen, ibuprofen, vitamin E, biotin etc. Oligonucleotides that comprise a number of phosphorothioate linkages are also known to bind to serum protein, thus short oligonucleotides, e.g., oligonucleotides of about 5 bases, 10 bases, 15 bases or 20 bases, comprising multiple of phosphorothioate linkages in the backbone are also amenable to the present disclosure as ligands (e.g. as PK modulating ligands). In addition, aptamers that bind serum components (e.g. serum proteins) are also suitable for use as PK modulating ligands in the embodiments described herein.

[0552] Ligand-conjugated iRNAs of the disclosure may be synthesized by the use of an oligonucleotide that bears a pendant reactive functionality, such as that derived from the attachment of a linking molecule onto the oligonucleotide (described below). This reactive oligonucleotide may be reacted directly with commercially-available ligands, ligands that are synthesized bearing any of a variety of protecting groups, or ligands that have a linking moiety attached thereto.

[0553] The oligonucleotides used in the conjugates of the present disclosure may be conveniently and routinely made through the well-known technique of solid-phase synthesis. Equipment for such synthesis is sold by several vendors including, for example, Applied Biosystems® (Foster City, Calif.). Any other means for such synthesis known in the art may additionally or alternatively be employed. It is also known to use similar techniques to prepare other oligonucleotides, such as the phosphorothioates and alkylated derivatives.

[0554] In the ligand-conjugated oligonucleotides and ligand-molecule bearing sequence-specific linked nucleosides of the present disclosure, the oligonucleotides and oligonucleosides may be assembled on a suitable DNA synthesizer utilizing standard nucleotide or nucleoside precursors, or nucleotide or nucleoside conjugate precursors that already bear the linking moiety, ligand-nucleotide or nucleoside-conjugate precursors that already bear the ligand molecule, or non-nucleoside ligand-bearing building blocks.

[0555] When using nucleotide-conjugate precursors that already bear a linking moiety, the synthesis of the sequence-specific linked nucleosides is typically completed, and the ligand molecule is then reacted with the linking moiety to form the ligand-conjugated oligonucleotide. In some embodiments, the oligonucleotides or linked nucleosides of the present disclosure are synthesized by an automated synthesizer using phosphoramidites derived from ligand-nucleoside conjugates in addition to the standard phosphoramidites and non-standard phosphoramidites that are commercially available and routinely used in oligonucleotide synthesis.

### A. Lipid Conjugates

[0556] In certain embodiments, the ligand or conjugate is a lipid or lipid-based molecule. Such a lipid or lipid-based molecule can typically bind a serum protein, such as human serum albumin (HSA). An HSA binding ligand allows for distribution of the conjugate to a target tissue, e.g., a non-kidney target tissue of the body. For example, the target tissue can be the liver, including parenchymal cells of the liver. Other molecules that can bind HSA can also be used as ligands. For example, naproxen or aspirin can be used. A lipid or lipid-based ligand can (a) increase resistance to degradation of the conjugate, (b) increase targeting or transport into a target cell or cell membrane, or (c) can be used to adjust binding to a serum protein, e.g., HSA.

[0557] A lipid-based ligand can be used to modulate, e.g., control (e.g., inhibit) the binding of the conjugate to a target tissue. For example, a lipid or lipid-based ligand that binds to HSA more strongly will be less likely to be targeted to the kidney and therefore less likely to be cleared from the body. A lipid or lipid-based ligand that binds to HSA less strongly can be used to target the conjugate to the kidney.

[0558] In certain embodiments, the lipid-based ligand binds HSA. For example, the ligand can bind HSA with a sufficient affinity such that distribution of the conjugate to a non-kidney tissue is enhanced. However, the affinity is typically not so strong that the HSA-ligand binding cannot be reversed.

[0559] In certain embodiments, the lipid-based ligand binds HSA weakly or not at all, such that distribution of the conjugate to the kidney is enhanced. Other moieties that target to kidney cells can also be used in place of or in addition to the lipid-based ligand.

[0560] In another aspect, the ligand is a moiety, e.g., a vitamin, which is taken up by a target cell, e.g., a proliferating cell. These are particularly useful for treating disorders characterized by unwanted cell proliferation, e.g., of the malignant or non-malignant type, e.g., cancer cells. Exemplary vitamins include vitamin A, E, and K. Other exemplary vitamins include are B vitamin, e.g., folic acid, B12, riboflavin, biotin, pyridoxal or other vitamins or nutrients taken up by cancer cells. Also included are HSA and low density lipoprotein (LDL).

### B. Cell Permeation Agents

[0561] In another aspect, the ligand is a cell-permeation agent, such as a helical cell-permeation agent. In certain embodiments, the agent is amphipathic. An exemplary agent is a peptide such as tat or antennopedia. If the agent is a peptide, it can be modified, including a peptidylmimetic, invertomers, non-peptide or pseudo-peptide linkages, and use of D-amino acids. The helical agent is typically an α-helical agent and can have a lipophilic and a lipophobic phase.

[0562] The ligand can be a peptide or peptidomimetic. A peptidomimetic (also referred to herein as an oligopeptidomimetic) is a molecule capable of folding into a defined three-dimensional structure similar to a natural peptide. The attachment of peptide and peptidomimetics to iRNA agents can affect pharmacokinetic distribution of the iRNA, such as by enhancing cellular recognition and absorption. The peptide or peptidomimetic moiety can be about 5-50 amino acids long, e.g., about 5, 10, 15, 20, 25, 30, 35, 40, 45, or 50 amino acids long.

[0563] A peptide or peptidomimetic can be, for example, a cell permeation peptide, cationic peptide, amphipathic peptide, or hydrophobic peptide (e.g., consisting primarily of Tyr, Trp, or Phe). The peptide moiety can be a dendrimer peptide, constrained peptide or crosslinked peptide. In another alternative, the peptide moiety can include a hydrophobic membrane translocation sequence (MTS). An exemplary hydrophobic MTS-containing peptide is RFGF having the amino acid sequence AAVALLPAVLLALLAP (SEQ ID NO: 9). An RFGF analogue (e.g., amino acid sequence AALLPVLLAAP (SEQ ID NO: 10)) containing a hydrophobic MTS can also be a targeting moiety. The peptide moiety can be a “delivery” peptide, which can carry large polar molecules including peptides, oligonucleotides, and protein across cell membranes. For example, sequences from the HIV Tat protein (GRKKRRQRRRPPQ (SEQ ID NO: 11)) and the Drosophila Antennapedia protein (RQIKIWFQNRRMKWKK (SEQ ID NO: 12)) have been found to be capable of functioning as delivery peptides. A peptide or peptidomimetic can be encoded by a random sequence of DNA, such as a peptide identified from a phage-display library, or one-bead-one-compound (OBOC) combinatorial library (Lam et al., Nature, 354: 82-84, 1991). Typically, the peptide or peptidomimetic tethered to a dsRNA agent via an incorporated monomer unit is a cell targeting peptide such as an arginine-glycine-aspartic acid (RGD)-peptide, or RGD mimic. A peptide moiety can range in length from about 5 amino acids to about 40 amino acids. The peptide moieties can have a structural modification, such as to increase stability or direct conformational properties. Any of the structural modifications described below can be utilized.

[0564] An RGD peptide for use in the compositions and methods of the disclosure may be linear or cyclic, and may be modified, e.g., glycosylated or methylated, to facilitate targeting to a specific tissue(s). RGD-containing peptides and peptidiomimemtics may include D-amino acids, as well as synthetic RGD mimics. In addition to RGD, one can use other moieties that target the integrin ligand. Preferred conjugates of this ligand target PECAM-1 or VEGF.

[0565] An RGD peptide moiety can be used to target a particular cell type, e.g., a tumor cell, such as an endothelial tumor cell or a breast cancer tumor cell (Zitzmann et al., Cancer Res., 62: 5139-43, 2002). An RGD peptide can facilitate targeting of an dsRNA agent to tumors of a variety of other tissues, including the lung, kidney, spleen, or liver (Aoki et al., Cancer Gene Therapy 8: 783-787, 2001). Typically, the RGD peptide will facilitate targeting of an iRNA agent to the kidney. The RGD peptide can be linear or cyclic, and can be modified, e.g., glycosylated or methylated to facilitate targeting to specific tissues. For example, a glycosylated RGD peptide can deliver an iRNA agent to a tumor cell expressing αvβ₃ (Haubner et al., Jour. Nucl. Med., 42: 326-336, 2001).

[0566] A “cell permeation peptide” is capable of permeating a cell, e.g., a microbial cell, such as a bacterial or fungal cell, or a mammalian cell, such as a human cell. A microbial cell-permeating peptide can be, for example, an α-helical linear peptide (e.g., LL-37 or Ceropin P1), a disulfide bond-containing peptide (e.g., α-defensin, β-defensin or bactenecin), or a peptide containing only one or two dominating amino acids (e.g., PR-39 or indolicidin). A cell permeation peptide can also include a nuclear localization signal (NLS). For example, a cell permeation peptide can be a bipartite amphipathic peptide, such as MPG, which is derived from the fusion peptide domain of HIV-1 gp41 and the NLS of SV40 large T antigen (Simeoni et al., Nucl. Acids Res. 31: 2717-2724, 2003).

### C. Carbohydrate Conjugates

[0567] In some embodiments of the compositions and methods of the disclosure, an iRNA further comprises a carbohydrate. The carbohydrate conjugated iRNA are advantageous for the in vivo delivery of nucleic acids, as well as compositions suitable for in vivo therapeutic use, as described herein. As used herein, “carbohydrate” refers to a compound which is either a carbohydrate per se made up of one or more monosaccharide units having at least 6 carbon atoms (which can be linear, branched or cyclic) with an oxygen, nitrogen or sulfur atom bonded to each carbon atom; or a compound having as a part thereof a carbohydrate moiety made up of one or more monosaccharide units each having at least six carbon atoms (which can be linear, branched or cyclic), with an oxygen, nitrogen or sulfur atom bonded to each carbon atom. Representative carbohydrates include the sugars (mono-, di-, tri- and oligosaccharides containing from about 4, 5, 6, 7, 8, or 9 monosaccharide units), and polysaccharides such as starches, glycogen, cellulose and polysaccharide gums. Specific monosaccharides include C5 and above (e.g., C5, C6, C7, or C8) sugars; di- and tri-saccharides include sugars having two or three monosaccharide units (e.g., C5, C6, C7, or C8).

[0568] In certain embodiments, a carbohydrate conjugate comprises a monosaccharide.

[0569] In certain embodiments, the monosaccharide is an N-acetylgalactosamine (GalNAc). GalNAc conjugates, which comprise one or more N-acetylgalactosamine (GalNAc) derivatives, are described, for example, in U.S. Pat. No. 8,106,022, the entire content of which is hereby incorporated herein by reference. In some embodiments, the GalNAc conjugate serves as a ligand that targets the iRNA to particular cells. In some embodiments, the GalNAc conjugate targets the iRNA to liver cells, e.g., by serving as a ligand for the asialoglycoprotein receptor of liver cells (e.g., hepatocytes).

[0570] In some embodiments, the carbohydrate conjugate comprises one or more GalNAc derivatives. The GalNAc derivatives may be attached via a linker, e.g., a bivalent or trivalent branched linker. In some embodiments the GalNAc conjugate is conjugated to the 3′ end of the sense strand. In some embodiments, the GalNAc conjugate is conjugated to the iRNA agent (e.g., to the 3′ end of the sense strand) via a linker, e.g., a linker as described herein. In some embodiments the GalNAc conjugate is conjugated to the 5′ end of the sense strand. In some embodiments, the GalNAc conjugate is conjugated to the iRNA agent (e.g., to the 5′ end of the sense strand) via a linker, e.g., a linker as described herein.

[0571] In certain embodiments of the disclosure, the GalNAc or GalNAc derivative is attached to an iRNA agent of the disclosure via a monovalent linker. In some embodiments, the GalNAc or GalNAc derivative is attached to an iRNA agent of the disclosure via a bivalent linker. In yet other embodiments of the disclosure, the GalNAc or GalNAc derivative is attached to an iRNA agent of the disclosure via a trivalent linker. In other embodiments of the disclosure, the GalNAc or GalNAc derivative is attached to an iRNA agent of the disclosure via a tetravalent linker.

[0572] In certain embodiments, the double stranded RNAi agents of the disclosure comprise one GalNAc or GalNAc derivative attached to the iRNA agent. In certain embodiments, the double stranded RNAi agents of the disclosure comprise a plurality (e.g., 2, 3, 4, 5, or 6) GalNAc or GalNAc derivatives, each independently attached to a plurality of nucleotides of the double stranded RNAi agent through a plurality of monovalent linkers.

[0573] In some embodiments, for example, when the two strands of an iRNA agent of the disclosure are part of one larger molecule connected by an uninterrupted chain of nucleotides between the 3′-end of one strand and the 5′-end of the respective other strand forming a hairpin loop comprising, a plurality of unpaired nucleotides, each unpaired nucleotide within the hairpin loop may independently comprise a GalNAc or GalNAc derivative attached via a monovalent linker. The hairpin loop may also be formed by an extended overhang in one strand of the duplex.

[0574] In some embodiments, for example, when the two strands of an iRNA agent of the disclosure are part of one larger molecule connected by an uninterrupted chain of nucleotides between the 3′-end of one strand and the 5′-end of the respective other strand forming a hairpin loop comprising, a plurality of unpaired nucleotides, each unpaired nucleotide within the hairpin loop may independently comprise a GalNAc or GalNAc derivative attached via a monovalent linker. The hairpin loop may also be formed by an extended overhang in one strand of the duplex.

[0575] In some embodiments, the GalNAc conjugate is

[chemical structure]

[0576] In some embodiments, the RNAi agent is attached to the carbohydrate conjugate via a linker as shown in the following schematic, wherein X is O or S

[chemical structure]

[0577] In some embodiments, the RNAi agent is conjugated to L96 as defined in Table 1 and shown below:

[chemical structure]

[0578] In certain embodiments, a carbohydrate conjugate for use in the compositions and methods of the disclosure is selected from the group consisting of:

[chemical structure]

[chemical structure]

[chemical structure]

[chemical structure]

[chemical structure]

wherein Y is O or S and n is 3-6 (Formula XXIV);

[chemical structure]

wherein Y is O or S and n is 3-6 (Formula XXV);

[chemical structure]

wherein X is O or S (Formula XXVII);

[chemical structure]

[chemical structure]

[0579] In certain embodiments, a carbohydrate conjugate for use in the compositions and methods of the disclosure is a monosaccharide. In certain embodiments, the monosaccharide is an N-acetylgalactosamine, such as

[chemical structure]

[0580] Another representative carbohydrate conjugate for use in the embodiments described herein includes, but is not limited to,

[chemical structure]

[0581] when one of X or Y is an oligonucleotide, the other is a hydrogen.

[0582] In some embodiments, a suitable ligand is a ligand disclosed in WO 2019/055633, the entire contents of which are incorporated herein by reference. In one embodiment the ligand comprises the structure below:

[chemical structure]

[0583] In certain embodiments, the RNAi agents of the disclosure may include GalNAc ligands, even if such GalNAc ligands are currently projected to be of limited value for the preferred intrathecal/CNS delivery route(s) of the instant disclosure.

[0584] In certain embodiments of the disclosure, the GalNAc or GalNAc derivative is attached to an iRNA agent of the disclosure via a monovalent linker. In some embodiments, the GalNAc or GalNAc derivative is attached to an iRNA agent of the disclosure via a bivalent linker. In yet other embodiments of the disclosure, the GalNAc or GalNAc derivative is attached to an iRNA agent of the disclosure via a trivalent linker. In other embodiments of the disclosure, the GalNAc or GalNAc derivative is attached to an iRNA agent of the disclosure via a tetravalent linker.

[0585] In certain embodiments, the double stranded RNAi agents of the disclosure comprise one GalNAc or GalNAc derivative attached to the iRNA agent, e.g., the 5′end of the sense strand of a dsRNA agent, or the 5′ end of one or both sense strands of a dual targeting RNAi agent as described herein. In certain embodiments, the double stranded RNAi agents of the disclosure comprise a plurality (e.g., 2, 3, 4, 5, or 6) GalNAc or GalNAc derivatives, each independently attached to a plurality of nucleotides of the double stranded RNAi agent through a plurality of monovalent linkers.

[0586] In some embodiments, for example, when the two strands of an iRNA agent of the disclosure are part of one larger molecule connected by an uninterrupted chain of nucleotides between the 3′-end of one strand and the 5′-end of the respective other strand forming a hairpin loop comprising, a plurality of unpaired nucleotides, each unpaired nucleotide within the hairpin loop may independently comprise a GalNAc or GalNAc derivative attached via a monovalent linker.

[0587] In some embodiments, the carbohydrate conjugate further comprises one or more additional ligands as described above, such as, but not limited to, a PK modulator or a cell permeation peptide.

[0588] Additional carbohydrate conjugates and linkers suitable for use in the present disclosure include those described in WO 2014/179620 and WO 2014/179627, the entire contents of each of which are incorporated herein by reference.

### D. Linkers

[0589] In some embodiments, the conjugate or ligand described herein can be attached to an iRNA oligonucleotide with various linkers that can be cleavable or non-cleavable.

[0590] The term “linker” or “linking group” means an organic moiety that connects two parts of a compound, e.g., covalently attaches two parts of a compound. Linkers typically comprise a direct bond or an atom such as oxygen or sulfur, a unit such as NR8, C(O), C(O)NH, SO, SO₂, SO₂NH or a chain of atoms, such as, but not limited to, substituted or unsubstituted alkyl, substituted or unsubstituted alkenyl, substituted or unsubstituted alkynyl, arylalkyl, arylalkenyl, arylalkynyl, heteroarylalkyl, heteroarylalkenyl, heteroarylalkynyl, heterocyclylalkyl, heterocyclylalkenyl, heterocyclylalkynyl, aryl, heteroaryl, heterocyclyl, cycloalkyl, cycloalkenyl, alkylarylalkyl, alkylarylalkenyl, alkylarylalkynyl, alkenylarylalkyl, alkenylarylalkenyl, alkenylarylalkynyl, alkynylarylalkyl, alkynylarylalkenyl, alkynylarylalkynyl, alkylheteroarylalkyl, alkylheteroarylalkenyl, alkylheteroarylalkynyl, alkenylheteroarylalkyl, alkenylheteroarylalkenyl, alkenylheteroarylalkynyl, alkynylheteroarylalkyl, alkynylheteroarylalkenyl, alkynylheteroarylalkynyl, alkylheterocyclylalkyl, alkylheterocyclylalkenyl, alkylhererocyclylalkynyl, alkenylheterocyclylalkyl, alkenylheterocyclylalkenyl, alkenylheterocyclylalkynyl, alkynylheterocyclylalkyl, alkynylheterocyclylalkenyl, alkynylheterocyclylalkynyl, alkylaryl, alkenylaryl, alkynylaryl, alkylheteroaryl, alkenylheteroaryl, alkynylhereroaryl, which one or more methylenes can be interrupted or terminated by O, S, S(O), SO₂, N(R₈), C(O), substituted or unsubstituted aryl, substituted or unsubstituted heteroaryl, substituted or unsubstituted heterocyclic; where R₈ is hydrogen, acyl, aliphatic or substituted aliphatic. In certain embodiments, the linker is of a length of about 1-24 atoms, 2-24, 3-24, 4-24, 5-24, 6-24, 6-18, 7-18, 8-18 atoms, 7-17, 8-17, 6-16, 7-16, or 8-16 atoms.

[0591] A cleavable linking group is one which is sufficiently stable outside the cell, but which upon entry into a target cell is cleaved to release the two parts the linker is holding together. In a preferred embodiment, the cleavable linking group is cleaved at least about 10 times, 20, times, 30 times, 40 times, 50 times, 60 times, 70 times, 80 times, 90 times or more, or at least about 100 times faster in a target cell or under a first reference condition (which can, e.g., be selected to mimic or represent intracellular conditions) than in the blood of a subject, or under a second reference condition (which can, e.g., be selected to mimic or represent conditions found in the blood or serum).

[0592] Cleavable linking groups are susceptible to cleavage agents, e.g., pH, redox potential or the presence of degradative molecules. Generally, cleavage agents are more prevalent or found at higher levels or activities inside cells than in serum or blood. Examples of such degradative agents include: redox agents which are selected for particular substrates or which have no substrate specificity, including, e.g., oxidative or reductive enzymes or reductive agents such as mercaptans, present in cells, that can degrade a redox cleavable linking group by reduction; esterases; endosomes or agents that can create an acidic environment, e.g., those that result in a pH of five or lower; enzymes that can hydrolyze or degrade an acid cleavable linking group by acting as a general acid, peptidases (which can be substrate specific), and phosphatases.

[0593] A cleavable linkage group, such as a disulfide bond can be susceptible to pH. The pH of human serum is 7.4, while the average intracellular pH is slightly lower, ranging from about 7.1-7.3. Endosomes have a more acidic pH, in the range of 5.5-6.0, and lysosomes have an even more acidic pH at around 5.0. Some linkers will have a cleavable linking group that is cleaved at a preferred pH, thereby releasing a cationic lipid from the ligand inside the cell, or into the desired compartment of the cell.

[0594] A linker can include a cleavable linking group that is cleavable by a particular enzyme. The type of cleavable linking group incorporated into a linker can depend on the cell to be targeted. For example, a liver-targeting ligand can be linked to a cationic lipid through a linker that includes an ester group. Liver cells are rich in esterases, and therefore the linker will be cleaved more efficiently in liver cells than in cell types that are not esterase-rich. Other cell-types rich in esterases include cells of the lung, renal cortex, and testis.

[0595] Linkers that contain peptide bonds can be used when targeting cell types rich in peptidases, such as liver cells and synoviocytes.

[0596] In general, the suitability of a candidate cleavable linking group can be evaluated by testing the ability of a degradative agent (or condition) to cleave the candidate linking group. It will also be desirable to also test the candidate cleavable linking group for the ability to resist cleavage in the blood or when in contact with other non-target tissue. Thus, one can determine the relative susceptibility to cleavage between a first and a second condition, where the first is selected to be indicative of cleavage in a target cell and the second is selected to be indicative of cleavage in other tissues or biological fluids, e.g., blood or serum. The evaluations can be carried out in cell free systems, in cells, in cell culture, in organ or tissue culture, or in whole animals. It can be useful to make initial evaluations in cell-free or culture conditions and to confirm by further evaluations in whole animals. In preferred embodiments, useful candidate compounds are cleaved at least about 2, 4, 10, 20, 30, 40, 50, 60, 70, 80, 90, or about 100 times faster in the cell (or under in vitro conditions selected to mimic intracellular conditions) as compared to blood or serum (or under in vitro conditions selected to mimic extracellular conditions).

### i. Redox Cleavable Linking Groups

[0597] In certain embodiments, a cleavable linking group is a redox cleavable linking group that is cleaved upon reduction or oxidation. An example of reductively cleavable linking group is a disulphide linking group (—S—S—). To determine if a candidate cleavable linking group is a suitable “reductively cleavable linking group,” or for example is suitable for use with a particular iRNA moiety and particular targeting agent one can look to methods described herein. For example, a candidate can be evaluated by incubation with dithiothreitol (DTT), or other reducing agent using reagents know in the art, which mimic the rate of cleavage which would be observed in a cell, e.g., a target cell. The candidates can also be evaluated under conditions which are selected to mimic blood or serum conditions. In one, candidate compounds are cleaved by at most about 10% in the blood. In other embodiments, useful candidate compounds are degraded at least about 2, 4, 10, 20, 30, 40, 50, 60, 70, 80, 90, or about 100 times faster in the cell (or under in vitro conditions selected to mimic intracellular conditions) as compared to blood (or under in vitro conditions selected to mimic extracellular conditions). The rate of cleavage of candidate compounds can be determined using standard enzyme kinetics assays under conditions chosen to mimic intracellular media and compared to conditions chosen to mimic extracellular media.

### ii. Phosphate-Based Cleavable Linking Groups

[0598] In certain embodiments, a cleavable linker comprises a phosphate-based cleavable linking group. A phosphate-based cleavable linking group is cleaved by agents that degrade or hydrolyze the phosphate group. An example of an agent that cleaves phosphate groups in cells are enzymes such as phosphatases in cells. Examples of phosphate-based linking groups are —O—P(O)(ORk)-O—, —O—P(S)(ORk)-O—, —O—P(S)(SRk)-O—, —S—P(O)(ORk)-O—, —O—P(O)(ORk)-S—, —S—P(O)(ORk)-S—, —O—P(S)(ORk)-S—, —S—P(S)(ORk)-O—, —O—P(O)(Rk)-O—, —O—P(S)(Rk)-O—, —S—P(O)(Rk)-O—, —S—P(S)(Rk)-O—, —S—P(O)(Rk)-S—, —O—P(S)(Rk)-S. Preferred embodiments are —O—P(O)(OH)—O—, —O—P(S)(OH)—O—, —O—P(S)(SH)—O—, —S—P(O)(OH)—O—, —O—P(O)(OH)—S—, —S—P(O)(OH)—S—, —O—P(S)(OH)—S—, —S—P(S)(OH)—O—, —O—P(O)(H)—O—, —O—P(S)(H)—O—, —S—P(O)(H)-0, —S—P(S)(H)—O—, —S—P(O)(H)—S—, —O—P(S)(H)—S—. A preferred embodiment is —O—P(O)(OH)—O—. These candidates can be evaluated using methods analogous to those described above.

[0599] iii. Acid Cleavable Linking Groups

[0600] In certain embodiments, a cleavable linker comprises an acid cleavable linking group. An acid cleavable linking group is a linking group that is cleaved under acidic conditions. In preferred embodiments acid cleavable linking groups are cleaved in an acidic environment with a pH of about 6.5 or lower (e.g., about 6.0, 5.75, 5.5, 5.25, 5.0, or lower), or by agents such as enzymes that can act as a general acid. In a cell, specific low pH organelles, such as endosomes and lysosomes can provide a cleaving environment for acid cleavable linking groups. Examples of acid cleavable linking groups include but are not limited to hydrazones, esters, and esters of amino acids. Acid cleavable groups can have the general formula —C═NN—, C(O)O, or —OC(O). A preferred embodiment is when the carbon attached to the oxygen of the ester (the alkoxy group) is an aryl group, substituted alkyl group, or tertiary alkyl group such as dimethyl pentyl or t-butyl. These candidates can be evaluated using methods analogous to those described above.

### iv. Ester-Based Cleavable Linking Groups

[0601] In certain embodiments, a cleavable linker comprises an ester-based cleavable linking group. An ester-based cleavable linking group is cleaved by enzymes such as esterases and amidases in cells. Examples of ester-based cleavable linking groups include but are not limited to esters of alkylene, alkenylene and alkynylene groups. Ester cleavable linking groups have the general formula —C(O)O—, or —OC(O)—. These candidates can be evaluated using methods analogous to those described above.

### v. Peptide-Based Cleavable Linking Groups

[0602] In yet another embodiment, a cleavable linker comprises a peptide-based cleavable linking group. A peptide-based cleavable linking group is cleaved by enzymes such as peptidases and proteases in cells. Peptide-based cleavable linking groups are peptide bonds formed between amino acids to yield oligopeptides (e.g., dipeptides, tripeptides etc.) and polypeptides. Peptide-based cleavable groups do not include the amide group (—C(O)NH—). The amide group can be formed between any alkylene, alkenylene or alkynelene. A peptide bond is a special type of amide bond formed between amino acids to yield peptides and proteins. The peptide-based cleavage group is generally limited to the peptide bond (i.e., the amide bond) formed between amino acids yielding peptides and proteins and does not include the entire amide functional group. Peptide-based cleavable linking groups have the general formula —NHCHRAC(O)NHCHRBC(O)—, where R_{A} and R_{B} are the R groups of the two adjacent amino acids. These candidates can be evaluated using methods analogous to those described above.

[0603] In some embodiments, an iRNA of the disclosure is conjugated to a carbohydrate through a linker. Non-limiting examples of iRNA carbohydrate conjugates with linkers of the compositions and methods of the disclosure include, but are not limited to,

[chemical structure]

[chemical structure]

[chemical structure]

when one of X or Y is an oligonucleotide, the other is a hydrogen.

[0604] In certain embodiments of the compositions and methods of the disclosure, a ligand is one or more “GalNAc” (N-acetylgalactosamine) derivatives attached through a bivalent or trivalent branched linker.

[0605] In certain embodiments, a dsRNA of the disclosure is conjugated to a bivalent or trivalent branched linker selected from the group of structures shown in any of formula (XLV)-(XLVI):

[chemical structure]

[0606] wherein:
[0607] q2A, q2B, q3A, q3B, q4A, q4B, q5A, q5B and q5C represent independently for each occurrence 0-20 and wherein the repeating unit can be the same or different;
[0608] P²A, P²B, P³A, P³B, P⁴A, P⁴B, P⁵A, P⁵B, P⁵C, T²A, T²B, T³A, T³B, T⁴A, T⁴B, T⁴A, T⁵B, T⁵C are each independently for each occurrence absent, CO, NH, O, S, OC(O), NHC(O), CH₂, CH₂NH or CH₂O;
[0609] Q2A, Q2B, Q3A Q3B Q4A, Q4B, Q5A Q5B Q⁵C are independently for each occurrence absent, alkylene, substituted alkylene wherein one or more methylenes can be interrupted or terminated by one or more of O, S, S(O), SO₂, N(RN), C(R′)═C(R″), C≡C or C(O);
[0610] R²A, R²B, R³A, R³B, R⁴A, R⁴B, R⁵A, R⁵B, R⁵C are each independently for each occurrence absent, NH, O, S, CH₂, C(O)O, C(O)NH, NHCH(R^{a})C(O), —C(O)—CH(R^{a})—NH—, CO, CH═N—O,

[chemical structure]

or heterocyclyl;
[0611] L^{2A}, L^{2B}, L³A, L^{3B}, L^{4A}, L^{4B}, L^{5A}, L^{5B} and L⁵C represent the ligand; i.e. each independently for each occurrence a monosaccharide (such as GalNAc), disaccharide, trisaccharide, tetrasaccharide, oligosaccharide, or polysaccharide; and R^{a} is H or amino acid side chain. Trivalent conjugating GalNAc derivatives are particularly useful for use with RNAi agents for inhibiting the expression of a target gene, such as those of formula (XLIX):

[chemical structure]

[0612] wherein L^{5A} L^{5B} and L^{5C} represent a monosaccharide, such as GalNAc derivative.

[0613] Examples of suitable bivalent and trivalent branched linker groups conjugating GalNAc derivatives include, but are not limited to, the structures recited above as formulas II, VII, XI, X, and XIII.

[0614] Representative U.S. Patents that teach the preparation of RNA conjugates include, but are not limited to, U.S. Pat. Nos. 4,828,979; 4,948,882; 5,218,105; 5,525,465; 5,541,313; 5,545,730; 5,552,538; 5,578,717, 5,580,731; 5,591,584; 5,109,124; 5,118,802; 5,138,045; 5,414,077; 5,486,603; 5,512,439; 5,578,718; 5,608,046; 4,587,044; 4,605,735; 4,667,025; 4,762,779; 4,789,737; 4,824,941; 4,835,263; 4,876,335; 4,904,582; 4,958,013; 5,082,830; 5,112,963; 5,214,136; 5,082,830; 5,112,963; 5,214,136; 5,245,022; 5,254,469; 5,258,506; 5,262,536; 5,272,250; 5,292,873; 5,317,098; 5,371,241, 5,391,723; 5,416,203, 5,451,463; 5,510,475; 5,512,667; 5,514,785; 5,565,552; 5,567,810; 5,574,142; 5,585,481; 5,587,371; 5,595,726; 5,597,696; 5,599,923; 5,599,928; 5,688,941; 6,294,664; 6,320,017; 6,576,752; 6,783,931; 6,900,297; 7,037,646; and 8,106,022, the entire contents of each of which are hereby incorporated herein by reference.

[0615] It is not necessary for all positions in a given compound to be uniformly modified, and in fact more than one of the aforementioned modifications can be incorporated in a single compound or even at a single nucleoside within an iRNA. The present disclosure also includes iRNA compounds that are chimeric compounds.

[0616] “Chimeric” iRNA compounds or “chimeras,” in the context of this disclosure, are iRNA compounds, optionally dsRNA agents, that contain two or more chemically distinct regions, each made up of at least one monomer unit, i.e., a nucleotide in the case of a dsRNA compound. These iRNAs typically contain at least one region wherein the RNA is modified so as to confer upon the iRNA increased resistance to nuclease degradation, increased cellular uptake, or increased binding affinity for the target nucleic acid. An additional region of the iRNA can serve as a substrate for enzymes capable of cleaving RNA: DNA or RNA: RNA hybrids. By way of example, RNase H is a cellular endonuclease which cleaves the RNA strand of an RNA: DNA duplex. Activation of RNase H, therefore, results in cleavage of the RNA target, thereby greatly enhancing the efficiency of iRNA inhibition of gene expression. Consequently, comparable results can often be obtained with shorter iRNAs when chimeric dsRNAs are used, compared to phosphorothioate deoxy dsRNAs hybridizing to the same target region. Cleavage of the RNA target can be routinely detected by gel electrophoresis and, if necessary, associated nucleic acid hybridization techniques known in the art.

[0617] In certain instances, the RNA of an iRNA can be modified by a non-ligand group. A number of non-ligand molecules have been conjugated to iRNAs in order to enhance the activity, cellular distribution or cellular uptake of the iRNA, and procedures for performing such conjugations are available in the scientific literature. Such non-ligand moieties have included lipid moieties, such as cholesterol (Kubo, T. et al., Biochem. Biophys. Res. Comm., 2007, 365(1): 54-61; Letsinger et al., Proc. Natl. Acad. Sci. USA, 1989, 86: 6553), cholic acid (Manoharan et al., Bioorg. Med. Chem. Lett., 1994, 4: 1053), a thioether, e.g., hexyl-S-tritylthiol (Manoharan et al., Ann. N.Y. Acad. Sci., 1992, 660: 306; Manoharan et al., Bioorg. Med. Chem. Let., 1993, 3: 2765), a thiocholesterol (Oberhauser et al., Nucl. Acids Res., 1992, 20: 533), an aliphatic chain, e.g., dodecandiol or undecyl residues (Saison-Behmoaras et al., EMBO J., 1991, 10: 111; Kabanov et al., FEBS Lett., 1990, 259: 327; Svinarchuk et al., Biochimie, 1993, 75: 49), a phospholipid, e.g., di-hexadecyl-rac-glycerol or triethylammonium 1,2-di-O-hexadecyl-rac-glycero-3-H-phosphonate (Manoharan et al., Tetrahedron Lett., 1995, 36: 3651; Shea et al., Nucl. Acids Res., 1990, 18: 3777), a polyamine or a polyethylene glycol chain (Manoharan et al., Nucleosides & Nucleotides, 1995, 14: 969), or adamantane acetic acid (Manoharan et al., Tetrahedron Lett., 1995, 36: 3651), a palmityl moiety (Mishra et al., Biochim. Biophys. Acta, 1995, 1264: 229), or an octadecylamine or hexylamino-carbonyl-oxycholesterol moiety (Crooke et al., J. Pharmacol. Exp. Ther., 1996, 277: 923). Representative United States patents that teach the preparation of such RNA conjugates have been listed above. Typical conjugation protocols involve the synthesis of RNAs bearing an aminolinker at one or more positions of the sequence. The amino group is then reacted with the molecule being conjugated using appropriate coupling or activating reagents. The conjugation reaction can be performed either with the RNA still bound to the solid support or following cleavage of the RNA, in solution phase. Purification of the RNA conjugate by HPLC typically affords the pure conjugate.

### IV. In Vivo Testing of ATXN2 Knockdown

[0618] Mouse models of ATXN2-associated neurodegenerative disease have been generated and can further be used to demonstrate the in vivo efficacy of the RNAi agents provided herein. Such models may contain constitutive or inducible expression, e.g., overexpression, of, for example, human ATXN2, in some instances comprising a pathogenic mutation (e.g., a polyQ expansion). In one such model, transgenic mice expressing the human spinocerebellar ataxia 2 (SCA2, ATXN2, olivopontocerebellar ataxia 2, autosomal dominant, ataxin 2) gene under the direction of the mouse PcP2 promoter were constructed (Huynh et al. Nat Genet 26: 44-50). To establish PcP2-SCA2 (ATXN2) transgenic mice, a transgenic construct containing a full length SCA2 cDNA (with a 58 CAG repeat) as well as the mouse PcP2 (Purkinje cell protein 2) promoter, untranslated and poly(A) sequences, was injected into B6D2F1 pronuclei. Founder animals were then obtained and crossed with B6D2F1 mice. Homozygous B6D2-Tg(PcP2-SCA2)₁₁Plt/J mice were found to be viable and fertile. ATXN2 transcripts and protein product were detected in the cerebellum. Immunohistochemical analysis demonstrated that the ATXN2 protein product was localized to the cytoplasm. Progressive functional deficits were evident in the ATXN2 transgenic mice as early as eight weeks of age, as measured by hind leg clasping and stride length. Also noted was a dramatic loss of Purkinje cell arbor, followed by a progressive decrease in Purkinje cell number. By 24-27 weeks, the number of Purkinje cells was reduced by approximately 50%. The mice were therefore established as a relevant model of spinocerebellar ataxia 2 (SCA2) disease.

### V. Delivery of an RNAi Agent of the Disclosure

[0619] The delivery of an RNAi agent of the disclosure to a cell e.g., a cell within a subject, such as a human subject (e.g., a subject in need thereof, such as a subject having an ATXN2-associated disorder, e.g., a spinocerebellar ataxia (SCA), such as spinocerebellar ataxia 2 (SCA2), or Amyotrophic Lateral Sclerosis (ALS), can be achieved in a number of different ways. For example, delivery may be performed by contacting a cell with an RNAi agent of the disclosure either in vitro or in vivo. In vivo delivery may also be performed directly by administering a composition comprising an RNAi agent, e.g., a dsRNA, to a subject. Alternatively, in vivo delivery may be performed indirectly by administering one or more vectors that encode and direct the expression of the RNAi agent. These alternatives are discussed further below.

[0620] In general, any method of delivering a nucleic acid molecule (in vitro or in vivo) can be adapted for use with an RNAi agent of the disclosure (see e.g., Akhtar S. and Julian RL., (1992) Trends Cell. Biol. 2(5): 139-144 and WO94/02595, which are incorporated herein by reference in their entireties). For in vivo delivery, factors to consider for delivering an RNAi agent include, for example, biological stability of the delivered agent, prevention of non-specific effects, and accumulation of the delivered agent in the target tissue. The non-specific effects of an RNAi agent can be minimized by local administration, for example, by direct injection or implantation into a tissue or topically administering the preparation. Local administration to a treatment site maximizes local concentration of the agent, limits the exposure of the agent to systemic tissues that can otherwise be harmed by the agent or that can degrade the agent, and permits a lower total dose of the RNAi agent to be administered. Several studies have shown successful knockdown of gene products when an RNAi agent is administered locally. For example, intraocular delivery of a VEGF dsRNA by intravitreal injection in cynomolgus monkeys (Tolentino, M J. et al., (2004) Retina 24: 132-138) and subretinal injections in mice (Reich, S J. et al. (2003) Mol. Vis. 9: 210-216) were both shown to prevent neovascularization in an experimental model of age-related macular degeneration. In addition, direct intratumoral injection of a dsRNA in mice reduces tumor volume (Pille, J. et al. (2005)Mol. Ther. 11: 267-274) and can prolong survival of tumor-bearing mice (Kim, W J. et al., (2006) Mol. Ther. 14: 343-350; Li, S. et al., (2007) Mol. Ther. 15: 515-523). RNA interference has also shown success with local delivery to the CNS by direct injection (Dorn, G. et al., (2004) Nucleic Acids 32: e49; Tan, P H. et al. (2005) Gene Ther. 12: 59-66; Makimura, H. et al. (2002) BMC Neurosci. 3: 18; Shishkina, G T., et al. (2004) Neuroscience 129: 521-528; Thakker, E R., et al. (2004)Proc. Natl. Acad. Sci. U.S.A. 101: 17270-17275; Akaneya, Y., et al. (2005) J. Neurophysiol. 93: 594-602) and to the lungs by intranasal administration (Howard, K A. et al., (2006) Mol. Ther. 14: 476-484; Zhang, X. et al., (2004) J. Biol. Chem. 279: 10677-10684; Bitko, V. et al., (2005) Nat. Med. 11: 50-55). For administering an RNAi agent systemically for the treatment of a disease, the RNA can be modified or alternatively delivered using a drug delivery system; both methods act to prevent the rapid degradation of the dsRNA by endo- and exo-nucleases in vivo. Modification of the RNA or the pharmaceutical carrier can also permit targeting of the RNAi agent to the target tissue and avoid undesirable off-target effects (e.g., without wishing to be bound by theory, use of GNAs as described herein has been identified to destabilize the seed region of a dsRNA, resulting in enhanced preference of such dsRNAs for on-target effectiveness, relative to off-target effects, as such off-target effects are significantly weakened by such seed region destabilization). RNAi agents can be modified by chemical conjugation to lipophilic groups such as cholesterol to enhance cellular uptake and prevent degradation. For example, an RNAi agent directed against ApoB conjugated to a lipophilic cholesterol moiety was injected systemically into mice and resulted in knockdown of apoB mRNA in both the liver and jejunum (Soutschek, J. et al., (2004) Nature 432: 173-178). Conjugation of an RNAi agent to an aptamer has been shown to inhibit tumor growth and mediate tumor regression in a mouse model of prostate cancer (McNamara, J O. et al., (2006) Nat. Biotechnol. 24: 1005-1015). In an alternative embodiment, the RNAi agent can be delivered using drug delivery systems such as a nanoparticle, a dendrimer, a polymer, liposomes, or a cationic delivery system. Positively charged cationic delivery systems facilitate binding of molecule RNAi agent (negatively charged) and also enhance interactions at the negatively charged cell membrane to permit efficient uptake of an RNAi agent by the cell. Cationic lipids, dendrimers, or polymers can either be bound to an RNAi agent, or induced to form a vesicle or micelle (see e.g., Kim SH. et al., (2008) Journal of Controlled Release 129(2): 107-116) that encases an RNAi agent. The formation of vesicles or micelles further prevents degradation of the RNAi agent when administered systemically. Methods for making and administering cationic-RNAi agent complexes are well within the abilities of one skilled in the art (see e.g., Sorensen, D R., et al. (2003) J. Mol. Biol 327: 761-766; Verma, U N. et al., (2003) Clin. Cancer Res. 9: 1291-1300; Arnold, A S et al. (2007) J. Hypertens. 25: 197-205, which are incorporated herein by reference in their entirety). Some non-limiting examples of drug delivery systems useful for systemic delivery of RNAi agents include DOTAP (Sorensen, D R., et al (2003), supra; Verma, U N. et al., (2003), supra), Oligofectamine, “solid nucleic acid lipid particles” (Zimmermann, T S. et al., (2006) Nature 441: 111-114), cardiolipin (Chien, P Y. et al., (2005) Cancer Gene Ther. 12: 321-328; Pal, A. et al., (2005) Int J. Oncol. 26: 1087-1091), polyethyleneimine (Bonnet ME. et al., (2008) Pharm. Res. August 16 Epub ahead of print; Aigner, A. (2006) J. Biomed. Biotechnol. 71659), Arg-Gly-Asp (RGD) peptides (Liu, S. (2006) Mol. Pharm. 3: 472-487), and polyamidoamines (Tomalia, D A. et al., (2007) Biochem. Soc. Trans. 35: 61-67; Yoo, H. et al., (1999) Pharm. Res. 16: 1799-1804). In some embodiments, an RNAi agent forms a complex with cyclodextrin for systemic administration. Methods for administration and pharmaceutical compositions of RNAi agents and cyclodextrins can be found in U.S. Pat. No. 7,427,605, which is herein incorporated by reference in its entirety.

[0621] Certain aspects of the instant disclosure relate to a method of reducing the expression of an ATXN2 target gene in a cell, comprising contacting said cell with the double-stranded RNAi agent of the disclosure. In one embodiment, the cell is a hepatic cell, optionally a hepatocyte. In one embodiment, the cell is an extrahepatic cell, optionally a CNS cell.

[0622] Another aspect of the disclosure relates to a method of reducing the expression of an ATXN2 target gene in a subject, comprising administering to the subject the double-stranded RNAi agent of the disclosure.

[0623] Another aspect of the disclosure relates to a method of treating a subject having an ATXN2-associated disorder, comprising administering to the subject a therapeutically effective amount of the double-stranded RNAi agent of the disclosure, thereby treating the subject. Exemplary CNS disorders that can be treated by the method of the disclosure include spinocerebellar ataxia (SCA), such as spinocerebellar ataxia 2 (SCA2), and Amyotrophic Lateral Sclerosis (ALS).

[0624] In one embodiment, the double-stranded RNAi agent is administered subcutaneously.

[0625] In one embodiment, the double-stranded RNAi agent is administered intrathecally. By intrathecal administration of the double-stranded RNAi agent, the method can reduce the expression of an ATXN2 target gene in a brain (e.g., striatum) or spine tissue, for instance, cortex, cerebellum, cervical spine, lumbar spine, and thoracic spine.

[0626] For ease of exposition the formulations, compositions and methods in this section are discussed largely with regard to modified siRNA compounds. It may be understood, however, that these formulations, compositions and methods can be practiced with other siRNA compounds, e.g., unmodified siRNA compounds, and such practice is within the disclosure. A composition that includes an RNAi agent can be delivered to a subject by a variety of routes. Exemplary routes include: intrathecal, intravenous, topical, rectal, anal, vaginal, nasal, pulmonary, and ocular.

[0627] The RNAi agents of the disclosure can be incorporated into pharmaceutical compositions suitable for administration. Such compositions typically include one or more species of RNAi agent and a pharmaceutically acceptable carrier. As used herein the language “pharmaceutically acceptable carrier” is intended to include any and all solvents, dispersion media, coatings, antibacterial and antifungal agents, isotonic and absorption delaying agents, and the like, compatible with pharmaceutical administration. The use of such media and agents for pharmaceutically active substances is well known in the art. Except insofar as any conventional media or agent is incompatible with the active compound, use thereof in the compositions is contemplated. Supplementary active compounds can also be incorporated into the compositions.

[0628] The pharmaceutical compositions of the present disclosure may be administered in a number of ways depending upon whether local or systemic treatment is desired and upon the area to be treated. Administration may be topical (including ophthalmic, vaginal, rectal, intranasal, transdermal), oral, or parenteral. Parenteral administration includes intravenous drip, subcutaneous, intraperitoneal or intramuscular injection, or intrathecal or intraventricular administration.

[0629] The route and site of administration may be chosen to enhance targeting. For example, to target muscle cells, intramuscular injection into the muscles of interest would be a logical choice. Lung cells might be targeted by administering the RNAi agent in aerosol form. The vascular endothelial cells could be targeted by coating a balloon catheter with the RNAi agent and mechanically introducing the RNA.

[0630] Formulations for topical administration may include transdermal patches, ointments, lotions, creams, gels, drops, suppositories, sprays, liquids, and powders. Conventional pharmaceutical carriers, aqueous, powder or oily bases, thickeners and the like may be necessary or desirable. Coated condoms, gloves and the like may also be useful.

[0631] Compositions for oral administration include powders or granules, suspensions or solutions in water, syrups, elixirs or non-aqueous media, tablets, capsules, lozenges, or troches. In the case of tablets, carriers that can be used include lactose, sodium citrate and salts of phosphoric acid. Various disintegrants such as starch, and lubricating agents such as magnesium stearate, sodium lauryl sulfate and talc, are commonly used in tablets. For oral administration in capsule form, useful diluents are lactose and high molecular weight polyethylene glycols. When aqueous suspensions are required for oral use, the nucleic acid compositions can be combined with emulsifying and suspending agents. If desired, certain sweetening or flavoring agents can be added.

[0632] Compositions for intrathecal or intraventricular administration may include sterile aqueous solutions which may also contain buffers, diluents, and other suitable additives.

[0633] Formulations for parenteral administration may include sterile aqueous solutions which may also contain buffers, diluents, and other suitable additives. Intraventricular injection may be facilitated by an intraventricular catheter, for example, attached to a reservoir. For intravenous use, the total concentration of solutes may be controlled to render the preparation isotonic.

[0634] In one embodiment, the administration of the siRNA compound, e.g., a double-stranded siRNA compound, or ssiRNA compound, composition is parenteral, e.g., intravenous (e.g., as a bolus or as a diffusible infusion), intradermal, intraperitoneal, intramuscular, intrathecal, intraventricular, intracranial, subcutaneous, transmucosal, buccal, sublingual, endoscopic, rectal, oral, vaginal, topical, pulmonary, intranasal, urethral, or ocular. Administration can be provided by the subject or by another person, e.g., a health care provider. The medication can be provided in measured doses or in a dispenser which delivers a metered dose. Selected modes of delivery are discussed in more detail below.

### Intrathecal Administration

[0635] In one embodiment, the double-stranded RNAi agent is delivered by intrathecal injection (i.e., injection into the spinal fluid which bathes the brain and spinal cord tissue). Intrathecal injection of RNAi agents into the spinal fluid can be performed as a bolus injection or via minipumps which can be implanted beneath the skin, providing a regular and constant delivery of siRNA into the spinal fluid. The circulation of the spinal fluid from the choroid plexus, where it is produced, down around the spinal cord and dorsal root ganglia and subsequently up past the cerebellum and over the cortex to the arachnoid granulations, where the fluid can exit the CNS, that, depending upon size, stability, and solubility of the compounds injected, molecules delivered intrathecally could hit targets throughout the entire CNS.

[0636] In some embodiments, the intrathecal administration is via a pump. The pump may be a surgically implanted osmotic pump. In one embodiment, the osmotic pump is implanted into the subarachnoid space of the spinal canal to facilitate intrathecal administration.

[0637] In some embodiments, the intrathecal administration is via an intrathecal delivery system for a pharmaceutical including a reservoir containing a volume of the pharmaceutical agent, and a pump configured to deliver a portion of the pharmaceutical agent contained in the reservoir. More details about this intrathecal delivery system may be found in WO 2015/116658, which is incorporated by reference in its entirety.

[0638] The amount of intrathecally injected RNAi agents may vary from one target gene to another target gene and the appropriate amount that has to be applied may have to be determined individually for each target gene. Typically, this amount ranges from 10 μg to 2 mg, optionally 50 g to 1500 μg, more optionally 100 μg to 1000 μg.

### Vector-Encoded RNAi Agents of the Disclosure

[0639] RNAi agents targeting the ATXN2 gene can be expressed from transcription units inserted into DNA or RNA vectors (see, e.g., Couture, A, et al., TIG. (1996), 12: 5-10; WO 00/22113, WO 00/22114, and U.S. Pat. No. 6,054,299). Expression is optionally sustained (months or longer), depending upon the specific construct used and the target tissue or cell type. These transgenes can be introduced as a linear construct, a circular plasmid, or a viral vector, which can be an integrating or non-integrating vector. The transgene can also be constructed to permit it to be inherited as an extrachromosomal plasmid (Gassmann, et al., (1995) Proc. Natl. Acad. Sci. USA 92: 1292).

[0640] The individual strand or strands of an RNAi agent can be transcribed from a promoter on an expression vector. Where two separate strands are to be expressed to generate, for example, a dsRNA, two separate expression vectors can be co-introduced (e.g., by transfection or infection) into a target cell. Alternatively, each individual strand of a dsRNA can be transcribed by promoters both of which are located on the same expression plasmid. In one embodiment, a dsRNA is expressed as inverted repeat polynucleotides joined by a linker polynucleotide sequence such that the dsRNA has a stem and loop structure.

[0641] RNAi agent expression vectors are generally DNA plasmids or viral vectors. Expression vectors compatible with eukaryotic cells, optionally those compatible with vertebrate cells, can be used to produce recombinant constructs for the expression of an RNAi agent as described herein. Delivery of RNAi agent expressing vectors can be systemic, such as by intravenous or intramuscular administration, by administration to target cells ex-planted from the patient followed by reintroduction into the patient, or by any other means that allows for introduction into a desired target cell.

[0642] Viral vector systems which can be utilized with the methods and compositions described herein include, but are not limited to, (a) adenovirus vectors; (b) retrovirus vectors, including but not limited to lentiviral vectors, moloney murine leukemia virus, etc.; (c) adeno-associated virus (AAV) vectors; (d) herpes simplex virus vectors; (e) SV 40 vectors; (f) polyoma virus vectors; (g) papilloma virus vectors; (h) picornavirus vectors; (i) pox virus vectors such as an orthopox, e.g., vaccinia virus vectors or avipox, e.g. canary pox or fowl pox; and (j) a helper-dependent or gutless adenovirus. Replication-defective viruses can also be advantageous. Different vectors will or will not become incorporated into the cells' genome. The constructs can include viral sequences for transfection, if desired. Alternatively, the construct can be incorporated into vectors capable of episomal replication, e.g. EPV and EBV vectors. Constructs for the recombinant expression of an RNAi agent will generally require regulatory elements, e.g., promoters, enhancers, etc., to ensure the expression of the RNAi agent in target cells. Other aspects to consider for vectors and constructs are known in the art.

### VI. Pharmaceutical Compositions of the Invention

[0643] The present disclosure also includes pharmaceutical compositions and formulations which include the RNAi agents of the disclosure. In one embodiment, provided herein are pharmaceutical compositions containing an RNAi agent, as described herein, and a pharmaceutically acceptable carrier. The pharmaceutical compositions containing the RNAi agent are useful for treating a disease or disorder associated with the expression or activity of ATXN2, e.g., an ATXN2-associated neurodegenerative disease, such as a spinocerebellar ataxia (SCA), such as spinocerebellar ataxia 2 (SCA2), or Amyotrophic Lateral Sclerosis (ALS).

[0644] Such pharmaceutical compositions are formulated based on the mode of delivery. One example is compositions that are formulated for systemic administration via parenteral delivery, e.g., by intravenous (IV), intramuscular (IM), or for subcutaneous (subQ) delivery. Another example is compositions that are formulated for direct delivery into the CNS, e.g., by intrathecal or intravitreal routes of injection, optionally by infusion into the brain (e.g., striatum), such as by continuous pump infusion.

[0645] In some embodiments, the pharmaceutical compositions of the disclosure are pyrogen free or non-pyrogenic.

[0646] The pharmaceutical compositions of the disclosure may be administered in dosages sufficient to inhibit expression of an ATXN2 gene. In general, a suitable dose of an RNAi agent of the disclosure will be in the range of about 0.001 to about 200.0 milligrams per kilogram body weight of the recipient per day, generally in the range of about 1 to 50 mg per kilogram body weight per day.

[0647] A repeat-dose regimen may include administration of a therapeutic amount of an RNAi agent on a regular basis, such as monthly to once every six months. In certain embodiments, the RNAi agent is administered about once per quarter (i.e., about once every three months) to about twice per year.

[0648] After an initial treatment regimen (e.g., loading dose), the treatments can be administered on a less frequent basis.

[0649] In other embodiments, a single dose of the pharmaceutical compositions can be long lasting, such that subsequent doses are administered at not more than 1, 2, 3, or 4 or more month intervals. In some embodiments of the disclosure, a single dose of the pharmaceutical compositions of the disclosure is administered once per month. In other embodiments of the disclosure, a single dose of the pharmaceutical compositions of the disclosure is administered once per quarter to twice per year.

[0650] The skilled artisan will appreciate that certain factors can influence the dosage and timing required to effectively treat a subject, including but not limited to the severity of the disease or disorder, previous treatments, the general health or age of the subject, and other diseases present. Moreover, treatment of a subject with a therapeutically effective amount of a composition can include a single treatment or a series of treatments.

[0651] Advances in mouse genetics have generated mouse models for the study of ATXN2-associated diseases that would benefit from reduction in the expression of ATXN2. Such models can be used for in vivo testing of RNAi agents, as well as for determining a therapeutically effective dose. Suitable mouse models are known in the art and include, for example, the mouse models described elsewhere herein.

[0652] The pharmaceutical compositions of the present disclosure can be administered in a number of ways depending upon whether local or systemic treatment is desired and upon the area to be treated. Administration can be topical (e.g., by a transdermal patch), pulmonary, e.g., by inhalation or insufflation of powders or aerosols, including by nebulizer; intratracheal, intranasal, epidermal and transdermal, oral or parenteral. Parenteral administration includes intravenous, intraarterial, subcutaneous, intraperitoneal or intramuscular injection or infusion; subdermal, e.g., via an implanted device; or intracranial, e.g., by intraparenchymal, intrathecal or intraventricular, administration.

[0653] The RNAi agents can be delivered in a manner to target a particular tissue, such as the liver, the CNS (e.g., neuronal, glial or vascular tissue of the brain), or both the liver and CNS.

[0654] Pharmaceutical compositions and formulations for topical administration can include transdermal patches, ointments, lotions, creams, gels, drops, suppositories, sprays, liquids and powders. Conventional pharmaceutical carriers, aqueous, powder or oily bases, thickeners and the like can be necessary or desirable. Coated condoms, gloves and the like can also be useful. Suitable topical formulations include those in which the RNAi agents featured in the disclosure are in admixture with a topical delivery agent such as lipids, liposomes, fatty acids, fatty acid esters, steroids, chelating agents and surfactants. Suitable lipids and liposomes include neutral (e.g., dioleoylphosphatidyl DOPE ethanolamine, dimyristoylphosphatidyl choline DMPC, distearolyphosphatidyl choline) negative (e.g., dimyristoylphosphatidyl glycerol DMPG) and cationic (e.g., dioleoyltetramethylaminopropyl DOTAP and dioleoylphosphatidyl ethanolamine DOTMA). RNAi agents featured in the disclosure can be encapsulated within liposomes or can form complexes thereto, in particular to cationic liposomes. Alternatively, RNAi agents can be complexed to lipids, in particular to cationic lipids. Suitable fatty acids and esters include but are not limited to arachidonic acid, oleic acid, eicosanoic acid, lauric acid, caprylic acid, capric acid, myristic acid, palmitic acid, stearic acid, linoleic acid, linolenic acid, dicaprate, tricaprate, monoolein, dilaurin, glyceryl 1-monocaprate, 1-dodecylazacycloheptan-2-one, an acylcarnitine, an acylcholine, or a C1-20 alkyl ester (e.g., isopropylmyristate IPM), monoglyceride, diglyceride or pharmaceutically acceptable salt thereof. Topical formulations are described in detail in U.S. Pat. No. 6,747,014, which is incorporated herein by reference.

### A. RNAi Agent Formulations Comprising Membranous Molecular Assemblies

[0655] An RNAi agent for use in the compositions and methods of the disclosure can be formulated for delivery in a membranous molecular assembly, e.g., a liposome or a micelle. As used herein, the term “liposome” refers to a vesicle composed of amphiphilic lipids arranged in at least one bilayer, e.g., one bilayer or a plurality of bilayers. Liposomes include unilamellar and multilamellar vesicles that have a membrane formed from a lipophilic material and an aqueous interior. The aqueous portion contains the RNAi agent composition. The lipophilic material isolates the aqueous interior from an aqueous exterior, which typically does not include the RNAi agent composition, although in some examples, it may. Liposomes are useful for the transfer and delivery of active ingredients to the site of action. Because the liposomal membrane is structurally similar to biological membranes, when liposomes are applied to a tissue, the liposomal bilayer fuses with bilayer of the cellular membranes. As the merging of the liposome and cell progresses, the internal aqueous contents that include the RNAi agent are delivered into the cell where the RNAi agent can specifically bind to a target RNA and can mediate RNAi. In some cases, the liposomes are also specifically targeted, e.g., to direct the RNAi agent to particular cell types.

[0656] A liposome containing an RNAi agent can be prepared by a variety of methods. In one example, the lipid component of a liposome is dissolved in a detergent so that micelles are formed with the lipid component. For example, the lipid component can be an amphipathic cationic lipid or lipid conjugate. The detergent can have a high critical micelle concentration and may be nonionic. Exemplary detergents include cholate, CHAPS, octylglucoside, deoxycholate, and lauroyl sarcosine. The RNAi agent preparation is then added to the micelles that include the lipid component. The cationic groups on the lipid interact with the RNAi agent and condense around the RNAi agent to form a liposome. After condensation, the detergent is removed, e.g., by dialysis, to yield a liposomal preparation of RNAi agent.

[0657] If necessary, a carrier compound that assists in condensation can be added during the condensation reaction, e.g., by controlled addition. For example, the carrier compound can be a polymer other than a nucleic acid (e.g., spermine or spermidine). pH can also be adjusted to favor condensation.

[0658] Methods for producing stable polynucleotide delivery vehicles, which incorporate a polynucleotide/cationic lipid complex as structural components of the delivery vehicle, are further described in, e.g., WO 96/37194, the entire contents of which are incorporated herein by reference. Liposome formation can also include one or more aspects of exemplary methods described in Felgner, P. L. et al., (1987) Proc. Natl. Acad. Sci. USA 8: 7413-7417; U.S. Pat. Nos. 4,897,355; 5,171,678; Bangham et al., (1965) M Mol. Biol. 23: 238; Olson et al., (1979) Biochim. Biophys. Acta 557: 9; Szoka et al., (1978) Proc. Natl. Acad. Sci. 75: 4194; Mayhew et al., (1984) Biochim. Biophys. Acta 775: 169; Kim et al., (1983) Biochim. Biophys. Acta 728: 339; and Fukunaga et al., (1984) Endocrinol. 115: 757. Commonly used techniques for preparing lipid aggregates of appropriate size for use as delivery vehicles include sonication and freeze-thaw plus extrusion (see, e.g., Mayer et al., (1986) Biochim. Biophys. Acta 858: 161. Microfluidization can be used when consistently small (50 to 200 nm) and relatively uniform aggregates are desired (Mayhew et al., (1984) Biochim. Biophys. Acta 775: 169. These methods are readily adapted to packaging RNAi agent preparations into liposomes.

[0659] Liposomes fall into two broad classes. Cationic liposomes are positively charged liposomes which interact with the negatively charged nucleic acid molecules to form a stable complex. The positively charged nucleic acid/liposome complex binds to the negatively charged cell surface and is internalized in an endosome. Due to the acidic pH within the endosome, the liposomes are ruptured, releasing their contents into the cell cytoplasm (Wang et al. (1987) Biochem. Biophys. Res. Commun., 147: 980-985).

[0660] Liposomes, which are pH-sensitive or negatively charged, entrap nucleic acids rather than complex with them. Since both the nucleic acid and the lipid are similarly charged, repulsion rather than complex formation occurs. Nevertheless, some nucleic acid is entrapped within the aqueous interior of these liposomes. pH sensitive liposomes have been used to deliver nucleic acids encoding the thymidine kinase gene to cell monolayers in culture. Expression of the exogenous gene was detected in the target cells (Zhou et al. (1992) Journal of Controlled Release, 19: 269-274).

[0661] One major type of liposomal composition includes phospholipids other than naturally-derived phosphatidylcholine. Neutral liposome compositions, for example, can be formed from dimyristoyl phosphatidylcholine (DMPC) or dipalmitoyl phosphatidylcholine (DPPC). Anionic liposome compositions generally are formed from dimyristoyl phosphatidylglycerol, while anionic fusogenic liposomes are formed primarily from dioleoyl phosphatidylethanolamine (DOPE). Another type of liposomal composition is formed from phosphatidylcholine (PC) such as, for example, soybean PC, and egg PC. Another type is formed from mixtures of phospholipid or phosphatidylcholine or cholesterol.

[0662] Examples of other methods to introduce liposomes into cells in vitro and in vivo include U.S. Pat. Nos. 5,283,185; 5,171,678; WO 94/00569; WO 93/24640; WO 91/16024; Felgner, (1994) J. Biol. Chem. 269: 2550; Nabel, (1993) Proc. Natl. Acad. Sci. 90: 11307; Nabel, (1992) Human Gene Ther. 3: 649; Gershon, (1993) Biochem. 32: 7143; and Strauss, (1992) EMBO J. 11: 417.

[0663] Non-ionic liposomal systems have also been examined to determine their utility in the delivery of drugs to the skin, in particular systems comprising non-ionic surfactant and cholesterol. Non-ionic liposomal formulations comprising Novasome™ I (glyceryl dilaurate/cholesterol/polyoxyethylene-10-stearyl ether) and Novasome™ II (glyceryl distearate/cholesterol/polyoxyethylene-10-stearyl ether) were used to deliver cyclosporin-A into the dermis of mouse skin. Results indicated that such non-ionic liposomal systems were effective in facilitating the deposition of cyclosporine A into different layers of the skin (Hu et al., (1994) S.T.P. Pharma. Sci., 4(6): 466).

[0664] Liposomes also include “sterically stabilized” liposomes, a term which, as used herein, refers to liposomes comprising one or more specialized lipids that, when incorporated into liposomes, result in enhanced circulation lifetimes relative to liposomes lacking such specialized lipids. Examples of sterically stabilized liposomes are those in which part of the vesicle-forming lipid portion of the liposome (A) comprises one or more glycolipids, such as monosialoganglioside G_{M1}, or (B) is derivatized with one or more hydrophilic polymers, such as a polyethylene glycol (PEG) moiety. While not wishing to be bound by any particular theory, it is thought in the art that, at least for sterically stabilized liposomes containing gangliosides, sphingomyelin, or PEG-derivatized lipids, the enhanced circulation half-life of these sterically stabilized liposomes derives from a reduced uptake into cells of the reticuloendothelial system (RES) (Allen et al., (1987) FEBS Letters, 223: 42; Wu et al., (1993) Cancer Research, 53: 3765).

[0665] Various liposomes comprising one or more glycolipids are known in the art. Papahadjopoulos et al. (Ann. N.Y. Acad. Sci., (1987), 507: 64) reported the ability of monosialoganglioside G_{M1}, galactocerebroside sulfate and phosphatidylinositol to improve blood half-lives of liposomes. These findings were expounded upon by Gabizon et al. (Proc. Natl. Acad. Sci. U.S.A., (1988), 85: 6949). U.S. Pat. No. 4,837,028 and WO 88/04924, both to Allen et al., disclose liposomes comprising (1) sphingomyelin and (2) the ganglioside G_{M1} or a galactocerebroside sulfate ester. U.S. Pat. No. 5,543,152 (Webb et al.) discloses liposomes comprising sphingomyelin. Liposomes comprising 1,2-sn-dimyristoylphosphatidylcholine are disclosed in WO 97/13499 (Lim et al).

[0666] In one embodiment, cationic liposomes are used. Cationic liposomes possess the advantage of being able to fuse to the cell membrane. Non-cationic liposomes, although not able to fuse as efficiently with the plasma membrane, are taken up by macrophages in vivo and can be used to deliver RNAi agents to macrophages.

[0667] Further advantages of liposomes include: liposomes obtained from natural phospholipids are biocompatible and biodegradable; liposomes can incorporate a wide range of water and lipid soluble drugs; liposomes can protect encapsulated RNAi agents in their internal compartments from metabolism and degradation (Rosoff, in “Pharmaceutical Dosage Forms,” Lieberman, Rieger and Banker (Eds.), 1988, volume 1, p. 245). Important considerations in the preparation of liposome formulations are the lipid surface charge, vesicle size and the aqueous volume of the liposomes.

[0668] A positively charged synthetic cationic lipid, N-[1-(2,3-dioleyloxy)propyl]-N,N,N-trimethylammonium chloride (DOTMA) can be used to form small liposomes that interact spontaneously with nucleic acid to form lipid-nucleic acid complexes which are capable of fusing with the negatively charged lipids of the cell membranes of tissue culture cells, resulting in delivery of RNAi agent (see, e.g., Felgner, P. L. et al., (1987) Proc. Natl. Acad. Sci. USA 8: 7413-7417, and U.S. Pat. No. 4,897,355 for a description of DOTMA and its use with DNA).

[0669] A DOTMA analogue, 1,2-bis(oleoyloxy)-3-(trimethylammonia)propane (DOTAP) can be used in combination with a phospholipid to form DNA-complexing vesicles. Lipofectin™ Bethesda Research Laboratories, Gaithersburg, Md.) is an effective agent for the delivery of highly anionic nucleic acids into living tissue culture cells that comprise positively charged DOTMA liposomes which interact spontaneously with negatively charged polynucleotides to form complexes. When enough positively charged liposomes are used, the net charge on the resulting complexes is also positive. Positively charged complexes prepared in this way spontaneously attach to negatively charged cell surfaces, fuse with the plasma membrane, and efficiently deliver functional nucleic acids into, for example, tissue culture cells. Another commercially available cationic lipid, 1,2-bis(oleoyloxy)-3,3-(trimethylammonia)propane (“DOTAP”) (Boehringer Mannheim, Indianapolis, Indiana) differs from DOTMA in that the oleoyl moieties are linked by ester, rather than ether linkages.

[0670] Other reported cationic lipid compounds include those that have been conjugated to a variety of moieties including, for example, carboxyspermine which has been conjugated to one of two types of lipids and includes compounds such as 5-carboxyspermylglycine dioctaoleoylamide (“DOGS”) (Transfectam™, Promega, Madison, Wisconsin) and dipalmitoylphosphatidylethanolamine 5-carboxyspermyl-amide (“DPPES”) (see, e.g., U.S. Pat. No. 5,171,678).

[0671] Another cationic lipid conjugate includes derivatization of the lipid with cholesterol (“DC-Chol”) which has been formulated into liposomes in combination with DOPE (See, Gao, X. and Huang, L., (1991) Biochim. Biophys. Res. Commun. 179: 280). Lipopolylysine, made by conjugating polylysine to DOPE, has been reported to be effective for transfection in the presence of serum (Zhou, X. et al., (1991) Biochim. Biophys. Acta 1065: 8). For certain cell lines, these liposomes containing conjugated cationic lipids, are said to exhibit lower toxicity and provide more efficient transfection than the DOTMA-containing compositions. Other commercially available cationic lipid products include DMRIE and DMRIE-HP (Vical, La Jolla, California) and Lipofectamine (DOSPA) (Life Technology, Inc., Gaithersburg, Maryland). Other cationic lipids suitable for the delivery of oligonucleotides are described in WO 98/39359 and WO 96/37194.

[0672] Liposomal formulations are particularly suited for topical administration, liposomes present several advantages over other formulations. Such advantages include reduced side effects related to high systemic absorption of the administered drug, increased accumulation of the administered drug at the desired target, and the ability to administer RNAi agent into the skin. In some implementations, liposomes are used for delivering RNAi agent to epidermal cells and also to enhance the penetration of RNAi agent into dermal tissues, e.g., into skin. For example, the liposomes can be applied topically. Topical delivery of drugs formulated as liposomes to the skin has been documented (see, e.g., Weiner et al., (1992) Journal of Drug Targeting, vol. 2,405-410 and du Plessis et al., (1992) Antiviral Research, 18: 259-265; Mannino, R. J. and Fould-Fogerite, S., (1998) Biotechniques 6: 682-690; Itani, T. et al., (1987) Gene 56: 267-276; Nicolau, C. et al. (1987) Meth. Enzymol. 149: 157-176; Straubinger, R. M. and Papahadjopoulos, D. (1983) Meth. Enzymol. 101: 512-527; Wang, C. Y. and Huang, L., (1987) Proc. Natl. Acad. Sci. USA 84: 7851-7855).

[0673] Non-ionic liposomal systems have also been examined to determine their utility in the delivery of drugs to the skin, in particular systems comprising non-ionic surfactant and cholesterol. Non-ionic liposomal formulations comprising Novasome I (glyceryl dilaurate/cholesterol/polyoxyethylene-10-stearyl ether) and Novasome II (glyceryl distearate/cholesterol/polyoxyethylene-10-stearyl ether) were used to deliver a drug into the dermis of mouse skin. Such formulations with RNAi agent are useful for treating a dermatological disorder.

[0674] Liposomes that include RNAi agents can be made highly deformable. Such deformability can enable the liposomes to penetrate through pore that are smaller than the average radius of the liposome. For example, transfersomes (highly deformable lipid aggregates which are attractive candidates for drug delivery vehicles) are a type of deformable liposomes. Transfersomes can be described as lipid droplets which are so highly deformable that they are easily able to penetrate through pores which are smaller than the droplet. Transfersomes are adaptable to the environment in which they are used, e.g., they are self-optimizing (adaptive to the shape of pores in the skin), self-repairing, frequently reach their targets without fragmenting, and often self-loading. Transferosomes can be made by adding surface edge activators, usually surfactants, to a standard liposomal composition. Transfersomes have been used to deliver serum albumin to the skin. The transfersome-mediated delivery of serum albumin has been shown to be as effective as subcutaneous injection of a solution containing serum albumin. Transfersomes that include RNAi agent can be delivered, for example, subcutaneously by infection in order to deliver RNAi agent to keratinocytes in the skin. In order to cross intact mammalian skin, lipid vesicles must pass through a series of fine pores, each with a diameter less than 50 nm, under the influence of a suitable transdermal gradient. In addition, due to the lipid properties, these transferosomes can be self-optimizing (adaptive to the shape of pores, e.g., in the skin), self-repairing, and can frequently reach their targets without fragmenting, and often self-loading.

[0675] Other formulations amenable to the present disclosure are described in U.S. provisional application Ser. No. 61/018,616, filed Jan. 2, 2008; 61/018,611, filed Jan. 2, 2008; 61/039,748, filed Mar. 26, 2008; 61/047,087, filed Apr. 22, 2008 and 61/051,528, filed May 8, 2008. PCT application number PCT/US2007/080331, filed Oct. 3, 2007, also describes formulations that are amenable to the present disclosure.

[0676] Surfactants find wide application in formulations such as those described herein, particularly in emulsions (including microemulsions) and liposomes. The most common way of classifying and ranking the properties of the many different types of surfactants, both natural and synthetic, is by the use of the hydrophile/lipophile balance (HLB). The nature of the hydrophilic group (also known as the “head”) provides the most useful means for categorizing the different surfactants used in formulations (Rieger, in Pharmaceutical Dosage Forms, Marcel Dekker, Inc., New York, N.Y., 1988, p. 285).

[0677] If the surfactant molecule is not ionized, it is classified as a nonionic surfactant. Nonionic surfactants find wide application in pharmaceutical and cosmetic products and are usable over a wide range of pH values. In general, their HLB values range from 2 to about 18 depending on their structure. Nonionic surfactants include nonionic esters such as ethylene glycol esters, propylene glycol esters, glyceryl esters, polyglyceryl esters, sorbitan esters, sucrose esters, and ethoxylated esters. Nonionic alkanolamides and ethers such as fatty alcohol ethoxylates, propoxylated alcohols, and ethoxylated/propoxylated block polymers are also included in this class. The polyoxyethylene surfactants are the most popular members of the nonionic surfactant class.

[0678] If the surfactant molecule carries a negative charge when it is dissolved or dispersed in water, the surfactant is classified as anionic. Anionic surfactants include carboxylates such as soaps, acyl lactylates, acyl amides of amino acids, esters of sulfuric acid such as alkyl sulfates and ethoxylated alkyl sulfates, sulfonates such as alkyl benzene sulfonates, acyl isethionates, acyl taurates and sulfosuccinates, and phosphates. The most important members of the anionic surfactant class are the alkyl sulfates and the soaps.

[0679] If the surfactant molecule carries a positive charge when it is dissolved or dispersed in water, the surfactant is classified as cationic. Cationic surfactants include quaternary ammonium salts and ethoxylated amines. The quaternary ammonium salts are the most used members of this class.

[0680] If the surfactant molecule has the ability to carry either a positive or negative charge, the surfactant is classified as amphoteric. Amphoteric surfactants include acrylic acid derivatives, substituted alkylamides, N-alkylbetaines and phosphatides.

[0681] The use of surfactants in drug products, formulations and in emulsions has been reviewed (Rieger, in Pharmaceutical Dosage Forms, Marcel Dekker, Inc., New York, N.Y., 1988, p. 285).

[0682] The RNAi agent for use in the methods of the disclosure can also be provided as micellar formulations. “Micelles” are defined herein as a particular type of molecular assembly in which amphipathic molecules are arranged in a spherical structure such that all the hydrophobic portions of the molecules are directed inward, leaving the hydrophilic portions in contact with the surrounding aqueous phase. The converse arrangement exists if the environment is hydrophobic.

[0683] A mixed micellar formulation suitable for delivery through transdermal membranes may be prepared by mixing an aqueous solution of the siRNA composition, an alkali metal C₈ to C₂₂ alkyl sulphate, and a micelle forming compounds. Exemplary micelle forming compounds include lecithin, hyaluronic acid, pharmaceutically acceptable salts of hyaluronic acid, glycolic acid, lactic acid, chamomile extract, cucumber extract, oleic acid, linoleic acid, linolenic acid, monoolein, monooleates, monolaurates, borage oil, evening of primrose oil, menthol, trihydroxy oxo cholanyl glycine and pharmaceutically acceptable salts thereof, glycerin, polyglycerin, lysine, polylysine, triolein, polyoxyethylene ethers and analogues thereof, polidocanol alkyl ethers and analogues thereof, chenodeoxycholate, deoxycholate, and mixtures thereof. The micelle forming compounds may be added at the same time or after addition of the alkali metal alkyl sulphate. Mixed micelles will form with substantially any kind of mixing of the ingredients but vigorous mixing in order to provide smaller size micelles.

[0684] In one method a first micellar composition is prepared which contains the siRNA composition and at least the alkali metal alkyl sulphate. The first micellar composition is then mixed with at least three micelle forming compounds to form a mixed micellar composition. In another method, the micellar composition is prepared by mixing the siRNA composition, the alkali metal alkyl sulphate and at least one of the micelle forming compounds, followed by addition of the remaining micelle forming compounds, with vigorous mixing.

[0685] Phenol or m-cresol may be added to the mixed micellar composition to stabilize the formulation and protect against bacterial growth. Alternatively, phenol or m-cresol may be added with the micelle forming ingredients. An isotonic agent such as glycerin may also be added after formation of the mixed micellar composition.

[0686] For delivery of the micellar formulation as a spray, the formulation can be put into an aerosol dispenser and the dispenser is charged with a propellant. The propellant, which is under pressure, is in liquid form in the dispenser. The ratios of the ingredients are adjusted so that the aqueous and propellant phases become one, i.e., there is one phase. If there are two phases, it is necessary to shake the dispenser prior to dispensing a portion of the contents, e.g., through a metered valve. The dispensed dose of pharmaceutical agent is propelled from the metered valve in a fine spray.

[0687] Propellants may include hydrogen-containing chlorofluorocarbons, hydrogen-containing fluorocarbons, dimethyl ether and diethyl ether. In certain embodiments, HFA 134a (1,1,1,2 tetrafluoroethane) may be used.

[0688] The specific concentrations of the essential ingredients can be determined by relatively straightforward experimentation. For absorption through the oral cavities, it is often desirable to increase, e.g., at least double or triple, the dosage for through injection or administration through the gastrointestinal tract.

### Lipid Particles

[0689] RNAi agents, e.g., dsRNAs of in the disclosure may be fully encapsulated in a lipid formulation, e.g., a LNP, or other nucleic acid-lipid particle.

[0690] As used herein, the term “LNP” refers to a stable nucleic acid-lipid particle. LNPs typically contain a cationic lipid, a non-cationic lipid, and a lipid that prevents aggregation of the particle (e.g., a PEG-lipid conjugate). LNPs are extremely useful for systemic applications, as they exhibit extended circulation lifetimes following intravenous (i.v.) injection and accumulate at distal sites (e.g., sites physically separated from the administration site). LNPs include “pSPLP,” which include an encapsulated condensing agent-nucleic acid complex as set forth in WO 00/03683. The particles of the present disclosure typically have a mean diameter of about 50 nm to about 150 nm, more typically about 60 nm to about 130 nm, more typically about 70 nm to about 110 nm, most typically about 70 nm to about 90 nm, and are substantially nontoxic. In addition, the nucleic acids when present in the nucleic acid-lipid particles of the present disclosure are resistant in aqueous solution to degradation with a nuclease. Nucleic acid-lipid particles and their method of preparation are disclosed in, e.g., U.S. Pat. Nos. 5,976,567; 5,981,501; 6,534,484; 6,586,410; 6,815,432; United States Patent publication No. 2010/0324120 and WO 96/40964.

[0691] In one embodiment, the lipid to drug ratio (mass/mass ratio) (e.g., lipid to dsRNA ratio) will be in the range of from about 1:1 to about 50:1, from about 1:1 to about 25:1, from about 3:1 to about 15:1, from about 4:1 to about 10:1, from about 5:1 to about 9:1, or about 6:1 to about 9:1. Ranges intermediate to the above recited ranges are also contemplated to be part of the disclosure.

[0692] Certain specific LNP formulations for delivery of RNAi agents have been described in the art, including, e.g., “LNP01” formulations as described in, e.g., WO 2008/042973, which is hereby incorporated by reference.

[0693] Additional exemplary lipid-dsRNA formulations are identified in the table below.

| | | cationic lipid/non-cationic |
|---|---|---|
| | | lipid/cholesterol/PEG-lipid |
| | | conjugate |
| | Ionizable/Cationic Lipid | Lipid:siRNA ratio |
| SNALP-1 | 1,2-Dilinolenyloxy-N,N- | DLinDMA/DPPC/Cholesterol/PEG- |
| | dimethylaminopropane (DLinDMA) | cDMA (57.1/7.1/34.4/1.4) |
| | | lipid:siRNA ~ 7:1 |
| 2-XTC | 2,2-Dilinoleyl-4-dimethylaminoethyl- | XTC/DPPC/Cholesterol/PEG- |
| | [1,3]-dioxolane (XTC) | cDMA 57.1/7.1/34.4/1.4 |
| | | lipid:siRNA ~ 7:1 |
| LNP05 | 2,2-Dilinoleyl-4-dimethylaminoethyl- | XTC/DSPC/Cholesterol/PEG- |
| | [1,3]-dioxolane (XTC) | DMG 57.5/7.5/31.5/3.5 |
| | | lipid:siRNA ~ 6:1 |
| LNP06 | 2,2-Dilinoley1-4-dimethylaminoethyl- | XTC/DSPC/Cholesterol/PEG- |
| | [1,3]-dioxolane (XTC) | DMG 57.5/7.5/31.5/3.5 |
| | | lipid:siRNA ~ 11:1 |
| LNP07 | 2,2-Dilinoleyl-4-dimethylaminoethyl- | XTC/DSPC/Cholesterol/PEG- |
| | [1,3]-dioxolane (XTC) | DMG 60/7.5/31/1.5, |
| | | lipid:siRNA ~ 6:1 |
| LNP08 | 2,2-Dilinoleyl-4-dimethylaminoethyl- | XTC/DSPC/Cholesterol/PEG- |
| | [1,3]-dioxolane (XTC) | DMG 60/7.5/31/1.5, |
| | | lipid:siRNA ~ 11:1 |
| LNP09 | 2,2-Dilinoley1-4-dimethylaminoethyl- | XTC/DSPC/Cholesterol/PEG- |
| | [1,3]-dioxolane (XTC) | DMG 50/10/38.5/1.5 |
| | | Lipid:siRNA 10:1 |
| LNP10 | (3aR,5s,6aS)-N,N-dimethyl-2,2- | ALN100/DSPC/Cholesterol/PEG- |
| | di((9Z,12Z)-octadeca-9,12- | DMG 50/10/38.5/1.5 |
| | dienyl)tetrahydro-3aH- | Lipid:siRNA 10:1 |
| | cyclopenta[d][1,3]dioxol-5-amine | |
| | (ALN100) | |
| LNP11 | (6Z,9Z,28Z,31Z)-heptatriaconta- | MC-3/DSPC/Cholesterol/PEG- |
| | 6,9,28,31-tetraen-19-yl | DMG 50/10/38.5/1.5 |
| | 4-(dimethylamino)butanoate (MC3) | Lipid:siRNA 10:1 |
| LNP12 | 1,1′-(2-(4-(2-((2-(bis(2- | Tech G1/DSPC/Cholesterol/ |
| | hydroxydodecyl)amino)ethyl)(2- | PEG-DMG 50/10/38.5/1.5 |
| | hydroxydodecyl)amino)ethyl)piperazin- | Lipid:siRNA 10:1 |
| | 1-yl)ethylazanediyl)didodecan-2-ol | |
| | (Tech G1) | |
| LNP13 | XTC | XTC/DSPC/Chol/PEG-DMG |
| | | 50/10/38.5/1.5 |
| | | Lipid:siRNA: 33:1 |
| LNP14 | MC3 | MC3/DSPC/Chol/PEG-DMG |
| | | 40/15/40/5 |
| | | Lipid:siRNA: 11:1 |
| LNP15 | MC3 | MC3/DSPC/Chol/PEG- |
| | | DSG/GalNAc-PEG-DSG |
| | | 50/10/35/4.5/0.5 |
| | | Lipid:siRNA: 11:1 |
| LNP16 | MC3 | MC3/DSPC/Chol/PEG-DMG |
| | | 50/10/38.5/1.5 |
| | | Lipid:siRNA: 7:1 |
| LNP17 | MC3 | MC3/DSPC/Chol/PEG-DSG |
| | | 50/10/38.5/1.5 |
| | | Lipid:siRNA: 10:1 |
| LNP18 | MC3 | MC3/DSPC/Chol/PEG-DMG |
| | | 50/10/38.5/1.5 |
| | | Lipid:siRNA: 12:1 |
| LNP19 | MC3 | MC3/DSPC/Chol/PEG-DMG |
| | | 50/10/35/5 |
| | | Lipid:siRNA: 8:1 |
| LNP20 | MC3 | MC3/DSPC/Chol/PEG-DPG |
| | | 50/10/38.5/1.5 |
| | | Lipid:siRNA: 10:1 |
| LNP21 | C12-200 | C12-200/DSPC/Chol/PEG- |
| | | DSG 50/10/38.5/1.5 |
| | | Lipid:siRNA: 7:1 |
| LNP22 | XTC | XTC/DSPC/Chol/PEG-DSG |
| | | 50/10/38.5/1.5 |
| | | Lipid:siRNA: 10:1 |

[0694] DSPC: distearoylphosphatidylcholine
[0695] DPPC: dipalmitoylphosphatidylcholine
[0696] PEG-DMG: PEG-didimyristoyl glycerol (C₁₄-PEG, or PEG-C₁₄) (PEG with avg mol wt of 2000)
[0697] PEG-DSG: PEG-distyryl glycerol (C₁₈-PEG, or PEG-C₁₈) (PEG with avg mol wt of 2000)
[0698] PEG-cDMA: PEG-carbamoyl-1,2-dimyristyloxypropylamine (PEG with avg mol wt of 2000)
[0699] SNALP (1,2-Dilinolenyloxy-N,N-dimethylaminopropane (DLinDMA)) comprising formulations are described in WO 2009/127060, which is hereby incorporated by reference.
[0700] XTC comprising formulations are described in WO 2010/088537, the entire contents of which are hereby incorporated herein by reference.
[0701] MC3 comprising formulations are described, e.g., in United States Patent Publication No. 2010/0324120, the entire contents of which are hereby incorporated by reference.
[0702] ALNY-100 comprising formulations are described in WO 2010/054406, the entire contents of which are hereby incorporated herein by reference.
[0703] C₁₂-200 comprising formulations are described in WO 2010/129709, the entire contents of which are hereby incorporated herein by reference.

[0704] Compositions and formulations for oral administration include powders or granules, microparticulates, nanoparticulates, suspensions or solutions in water or non-aqueous media, capsules, gel capsules, sachets, tablets or minitablets. Thickeners, flavoring agents, diluents, emulsifiers, dispersing aids or binders can be desirable. In some embodiments, oral formulations are those in which dsRNAs featured in the disclosure are administered in conjunction with one or more penetration enhancer surfactants and chelators. Suitable surfactants include fatty acids or esters or salts thereof, bile acids or salts thereof. Suitable bile acids/salts include chenodeoxycholic acid (CDCA) and ursodeoxychenodeoxycholic acid (UDCA), cholic acid, dehydrocholic acid, deoxycholic acid, glucholic acid, glycholic acid, glycodeoxycholic acid, taurocholic acid, taurodeoxycholic acid, sodium tauro-24,25-dihydro-fusidate and sodium glycodihydrofusidate. Suitable fatty acids include arachidonic acid, undecanoic acid, oleic acid, lauric acid, caprylic acid, capric acid, myristic acid, palmitic acid, stearic acid, linoleic acid, linolenic acid, dicaprate, tricaprate, monoolein, dilaurin, glyceryl 1-monocaprate, 1-dodecylazacycloheptan-2-one, an acylcarnitine, an acylcholine, or a monoglyceride, a diglyceride or a pharmaceutically acceptable salt thereof (e.g., sodium). In some embodiments, combinations of penetration enhancers are used, for example, fatty acids/salts in combination with bile acids/salts. One exemplary combination is the sodium salt of lauric acid, capric acid and UDCA. Further penetration enhancers include polyoxyethylene-9-lauryl ether, polyoxyethylene-20-cetyl ether. DsRNAs featured in the disclosure can be delivered orally, in granular form including sprayed dried particles, or complexed to form micro or nanoparticles. DsRNA complexing agents include poly-amino acids; polyimines; polyacrylates; polyalkylacrylates, polyoxethanes, polyalkylcyanoacrylates; cationized gelatins, albumins, starches, acrylates, polyethyleneglycols (PEG) and starches; polyalkylcyanoacrylates; DEAE-derivatized polyimines, pollulans, celluloses and starches. Suitable complexing agents include chitosan, N-trimethylchitosan, poly-L-lysine, polyhistidine, polyornithine, polyspermines, protamine, polyvinylpyridine, polythiodiethylaminomethylethylene P(TDAE), polyaminostyrene (e.g., p-amino), poly(methylcyanoacrylate), poly(ethylcyanoacrylate), poly(butylcyanoacrylate), poly(isobutylcyanoacrylate), poly(isohexylcynaoacrylate), DEAE-methacrylate, DEAE-hexylacrylate, DEAE-acrylamide, DEAE-albumin and DEAE-dextran, polymethylacrylate, polyhexylacrylate, poly(D,L-lactic acid), poly(DL-lactic-co-glycolic acid (PLGA), alginate, and polyethyleneglycol (PEG). Oral formulations for dsRNAs and their preparation are described in detail in U.S. Pat. No. 6,887,906, U.S. 2003/0027780, and U.S. Pat. No. 6,747,014, each of which is incorporated herein by reference.

[0705] Compositions and formulations for parenteral, intraparenchymal (into the brain), intrathecal, intraventricular or intrahepatic administration can include sterile aqueous solutions which can also contain buffers, diluents and other suitable additives such as, but not limited to, penetration enhancers, carrier compounds and other pharmaceutically acceptable carriers or excipients.

[0706] Pharmaceutical compositions of the present disclosure include, but are not limited to, solutions, emulsions, and liposome-containing formulations. These compositions can be generated from a variety of components that include, but are not limited to, preformed liquids, self-emulsifying solids and self-emulsifying semisolids. Particularly preferred are formulations that target the brain when treating APP-associated diseases or disorders.

[0707] The pharmaceutical formulations of the present disclosure, which can conveniently be presented in unit dosage form, can be prepared according to conventional techniques well known in the pharmaceutical industry. Such techniques include the step of bringing into association the active ingredients with the pharmaceutical carrier(s) or excipient(s). In general, the formulations are prepared by uniformly and intimately bringing into association the active ingredients with liquid carriers or finely divided solid carriers or both, and then, if necessary, shaping the product.

[0708] The compositions of the present disclosure can be formulated into any of many possible dosage forms such as, but not limited to, tablets, capsules, gel capsules, liquid syrups, soft gels, suppositories, and enemas. The compositions of the present disclosure can also be formulated as suspensions in aqueous, non-aqueous or mixed media. Aqueous suspensions can further contain substances which increase the viscosity of the suspension including, for example, sodium carboxymethylcellulose, sorbitol or dextran. The suspension can also contain stabilizers.

### Additional Formulations

### i. Emulsions

[0709] The compositions of the present disclosure can be prepared and formulated as emulsions. Emulsions are typically heterogeneous systems of one liquid dispersed in another in the form of droplets usually exceeding 0.1p m in diameter (see e.g., Ansel's Pharmaceutical Dosage Forms and Drug Delivery Systems, Allen, LV., Popovich NG., and Ansel HC., 2004, Lippincott Williams & Wilkins (8th ed.), New York, NY; Idson, in Pharmaceutical Dosage Forms, Lieberman, Rieger and Banker (Eds.), 1988, Marcel Dekker, Inc., New York, N.Y., volume 1, p. 199; Rosoff, in Pharmaceutical Dosage Forms, Lieberman, Rieger and Banker (Eds.), 1988, Marcel Dekker, Inc., New York, N.Y., Volume 1, p. 245; Block in Pharmaceutical Dosage Forms, Lieberman, Rieger and Banker (Eds.), 1988, Marcel Dekker, Inc., New York, N.Y., volume 2, p. 335; Higuchi et al., in Remington's Pharmaceutical Sciences, Mack Publishing Co., Easton, Pa., 1985, p. 301). Emulsions are often biphasic systems comprising two immiscible liquid phases intimately mixed and dispersed with each other. In general, emulsions can be of either the water-in-oil (w/o) or the oil-in-water (o/w) variety. When an aqueous phase is finely divided into and dispersed as minute droplets into a bulk oily phase, the resulting composition is called a water-in-oil (w/o) emulsion. Alternatively, when an oily phase is finely divided into and dispersed as minute droplets into a bulk aqueous phase, the resulting composition is called an oil-in-water (o/w) emulsion. Emulsions can contain additional components in addition to the dispersed phases, and the active drug which can be present as a solution in either aqueous phase, oily phase or itself as a separate phase. Pharmaceutical excipients such as emulsifiers, stabilizers, dyes, and anti-oxidants can also be present in emulsions as needed. Pharmaceutical emulsions can also be multiple emulsions that are comprised of more than two phases such as, for example, in the case of oil-in-water-in-oil (o/w/o) and water-in-oil-in-water (w/o/w) emulsions. Such complex formulations often provide certain advantages that simple binary emulsions do not. Multiple emulsions in which individual oil droplets of an o/w emulsion enclose small water droplets constitute a w/o/w emulsion. Likewise, a system of oil droplets enclosed in globules of water stabilized in an oily continuous phase provides an o/w/o emulsion.

[0710] Emulsions are characterized by little or no thermodynamic stability. Often, the dispersed or discontinuous phase of the emulsion is well dispersed into the external or continuous phase and maintained in this form through the means of emulsifiers or the viscosity of the formulation. Either of the phases of the emulsion can be a semisolid or a solid, as is the case of emulsion-style ointment bases and creams. Other means of stabilizing emulsions entail the use of emulsifiers that can be incorporated into either phase of the emulsion. Emulsifiers can broadly be classified into four categories: synthetic surfactants, naturally occurring emulsifiers, absorption bases, and finely dispersed solids (see e.g., Ansel's Pharmaceutical Dosage Forms and Drug Delivery Systems, Allen, LV., Popovich NG., and Ansel HC., 2004, Lippincott Williams & Wilkins (8th ed.), New York, NY; Idson, in Pharmaceutical Dosage Forms, Lieberman, Rieger and Banker (Eds.), 1988, Marcel Dekker, Inc., New York, N.Y., volume 1, p. 199).

[0711] Synthetic surfactants, also known as surface active agents, have found wide applicability in the formulation of emulsions and have been reviewed in the literature (see e.g., Ansel's Pharmaceutical Dosage Forms and Drug Delivery Systems, Allen, LV., Popovich NG., and Ansel HC., 2004, Lippincott Williams & Wilkins (8th ed.), New York, NY; Rieger, in Pharmaceutical Dosage Forms, Lieberman, Rieger and Banker (Eds.), 1988, Marcel Dekker, Inc., New York, N.Y., volume 1, p. 285; Idson, in Pharmaceutical Dosage Forms, Lieberman, Rieger and Banker (Eds.), Marcel Dekker, Inc., New York, N.Y., 1988, volume 1, p. 199). Surfactants are typically amphiphilic and comprise a hydrophilic and a hydrophobic portion. The ratio of the hydrophilic to the hydrophobic nature of the surfactant has been termed the hydrophile/lipophile balance (HLB) and is a valuable tool in categorizing and selecting surfactants in the preparation of formulations. Surfactants can be classified into different classes based on the nature of the hydrophilic group: nonionic, anionic, cationic and amphoteric (see e.g., Ansel's Pharmaceutical Dosage Forms and Drug Delivery Systems, Allen, LV., Popovich NG., and Ansel HC., 2004, Lippincott Williams & Wilkins (8th ed.), New York, NY Rieger, in Pharmaceutical Dosage Forms, Lieberman, Rieger and Banker (Eds.), 1988, Marcel Dekker, Inc., New York, N.Y., volume 1, p. 285).

[0712] Naturally occurring emulsifiers used in emulsion formulations include lanolin, beeswax, phosphatides, lecithin and acacia. Absorption bases possess hydrophilic properties such that they can soak up water to form w/o emulsions yet retain their semisolid consistencies, such as anhydrous lanolin and hydrophilic petrolatum. Finely divided solids have also been used as good emulsifiers especially in combination with surfactants and in viscous preparations. These include polar inorganic solids, such as heavy metal hydroxides, nonswelling clays such as bentonite, attapulgite, hectorite, kaolin, montmorillonite, colloidal aluminum silicate and colloidal magnesium aluminum silicate, pigments and nonpolar solids such as carbon or glyceryl tristearate.

[0713] A large variety of non-emulsifying materials are also included in emulsion formulations and contribute to the properties of emulsions. These include fats, oils, waxes, fatty acids, fatty alcohols, fatty esters, humectants, hydrophilic colloids, preservatives and antioxidants (Block, in Pharmaceutical Dosage Forms, Lieberman, Rieger and Banker (Eds.), 1988, Marcel Dekker, Inc., New York, N.Y., volume 1, p. 335; Idson, in Pharmaceutical Dosage Forms, Lieberman, Rieger and Banker (Eds.), 1988, Marcel Dekker, Inc., New York, N.Y., volume 1, p. 199).

[0714] Hydrophilic colloids or hydrocolloids include naturally occurring gums and synthetic polymers such as polysaccharides (for example, acacia, agar, alginic acid, carrageenan, guar gum, karaya gum, and tragacanth), cellulose derivatives (for example, carboxymethylcellulose and carboxypropylcellulose), and synthetic polymers (for example, carbomers, cellulose ethers, and carboxyvinyl polymers). These disperse or swell in water to form colloidal solutions that stabilize emulsions by forming strong interfacial films around the dispersed-phase droplets and by increasing the viscosity of the external phase.

[0715] Since emulsions often contain a number of ingredients such as carbohydrates, proteins, sterols and phosphatides that can readily support the growth of microbes, these formulations often incorporate preservatives. Commonly used preservatives included in emulsion formulations include methyl paraben, propyl paraben, quaternary ammonium salts, benzalkonium chloride, esters of p-hydroxybenzoic acid, and boric acid. Antioxidants are also commonly added to emulsion formulations to prevent deterioration of the formulation. Antioxidants used can be free radical scavengers such as tocopherols, alkyl gallates, butylated hydroxyanisole, butylated hydroxytoluene, or reducing agents such as ascorbic acid and sodium metabisulfite, and antioxidant synergists such as citric acid, tartaric acid, and lecithin.

[0716] The application of emulsion formulations via dermatological, oral and parenteral routes and methods for their manufacture have been reviewed in the literature (see e.g., Ansel's Pharmaceutical Dosage Forms and Drug Delivery Systems, Allen, LV., Popovich NG., and Ansel HC., 2004, Lippincott Williams & Wilkins (8th ed.), New York, NY; Idson, in Pharmaceutical Dosage Forms, Lieberman, Rieger and Banker (Eds.), 1988, Marcel Dekker, Inc., New York, N.Y., volume 1, p. 199). Emulsion formulations for oral delivery have been very widely used because of ease of formulation, as well as efficacy from an absorption and bioavailability standpoint (see e.g., Ansel's Pharmaceutical Dosage Forms and Drug Delivery Systems, Allen, LV., Popovich NG., and Ansel HC., 2004, Lippincott Williams & Wilkins (8th ed.), New York, NY; Rosoff, in Pharmaceutical Dosage Forms, Lieberman, Rieger and Banker (Eds.), 1988, Marcel Dekker, Inc., New York, N.Y., volume 1, p. 245; Idson, in Pharmaceutical Dosage Forms, Lieberman, Rieger and Banker (Eds.), 1988, Marcel Dekker, Inc., New York, N.Y., volume 1, p. 199). Mineral-oil base laxatives, oil-soluble vitamins and high fat nutritive preparations are among the materials that have commonly been administered orally as o/w emulsions.

### ii. Microemulsions

[0717] In one embodiment of the present disclosure, the compositions of RNAi agents and nucleic acids are formulated as microemulsions. A microemulsion can be defined as a system of water, oil and amphiphile which is a single optically isotropic and thermodynamically stable liquid solution (see e.g., Ansel's Pharmaceutical Dosage Forms and Drug Delivery Systems, Allen, LV., Popovich NG., and Ansel HC., 2004, Lippincott Williams & Wilkins (8th ed.), New York, NY; Rosoff, in Pharmaceutical Dosage Forms, Lieberman, Rieger and Banker (Eds.), 1988, Marcel Dekker, Inc., New York, N.Y., volume 1, p. 245). Typically, microemulsions are systems that are prepared by first dispersing an oil in an aqueous surfactant solution and then adding a sufficient amount of a fourth component, generally an intermediate chain-length alcohol to form a transparent system. Therefore, microemulsions have also been described as thermodynamically stable, isotropically clear dispersions of two immiscible liquids that are stabilized by interfacial films of surface-active molecules (Leung and Shah, in: Controlled Release of Drugs: Polymers and Aggregate Systems, Rosoff, M., Ed., 1989, VCH Publishers, New York, pages 185-215). Microemulsions commonly are prepared via a combination of three to five components that include oil, water, surfactant, cosurfactant and electrolyte. Whether the microemulsion is of the water-in-oil (w/o) or an oil-in-water (o/w) type is dependent on the properties of the oil and surfactant used, and on the structure and geometric packing of the polar heads and hydrocarbon tails of the surfactant molecules (Schott, in Remington's Pharmaceutical Sciences, Mack Publishing Co., Easton, Pa., 1985, p. 271).

[0718] The phenomenological approach utilizing phase diagrams has been extensively studied and has yielded a comprehensive knowledge, to one skilled in the art, of how to formulate microemulsions (see e.g., Ansel's Pharmaceutical Dosage Forms and Drug Delivery Systems, Allen, LV., Popovich NG., and Ansel HC., 2004, Lippincott Williams & Wilkins (8th ed.), New York, NY; Rosoff, in Pharmaceutical Dosage Forms, Lieberman, Rieger and Banker (Eds.), 1988, Marcel Dekker, Inc., New York, N.Y., volume 1, p. 245; Block, in Pharmaceutical Dosage Forms, Lieberman, Rieger and Banker (Eds.), 1988, Marcel Dekker, Inc., New York, N.Y., volume 1, p. 335). Compared to conventional emulsions, microemulsions offer the advantage of solubilizing water-insoluble drugs in a formulation of thermodynamically stable droplets that are formed spontaneously.

[0719] Surfactants used in the preparation of microemulsions include, but are not limited to, ionic surfactants, non-ionic surfactants, Brij 96, polyoxyethylene oleyl ethers, polyglycerol fatty acid esters, tetraglycerol monolaurate (ML310), tetraglycerol monooleate (MO310), hexaglycerol monooleate (PO310), hexaglycerol pentaoleate (PO500), decaglycerol monocaprate (MCA750), decaglycerol monooleate (MO750), decaglycerol sequioleate (S0750), decaglycerol decaoleate (DA0750), alone or in combination with cosurfactants. The cosurfactant, usually a short-chain alcohol such as ethanol, 1-propanol, and 1-butanol, serves to increase the interfacial fluidity by penetrating into the surfactant film and consequently creating a disordered film because of the void space generated among surfactant molecules. Microemulsions can, however, be prepared without the use of cosurfactants and alcohol-free self-emulsifying microemulsion systems are known in the art. The aqueous phase can typically be, but is not limited to, water, an aqueous solution of the drug, glycerol, PEG300, PEG400, polyglycerols, propylene glycols, and derivatives of ethylene glycol. The oil phase can include, but is not limited to, materials such as Captex 300, Captex 355, Capmul MCM, fatty acid esters, medium chain (C₈-C₁₂) mono, di, and tri-glycerides, polyoxyethylated glyceryl fatty acid esters, fatty alcohols, polyglycolized glycerides, saturated polyglycolized C₈-C₁₀ glycerides, vegetable oils and silicone oil.

[0720] Microemulsions are particularly of interest from the standpoint of drug solubilization and the enhanced absorption of drugs. Lipid based microemulsions (both o/w and w/o) have been proposed to enhance the oral bioavailability of drugs, including peptides (see e.g., U.S. Pat. Nos. 6,191,105; 7,063,860; 7,070,802; 7,157,099; Constantinides et al., Pharmaceutical Research, 1994, 11, 1385-1390; Ritschel, Meth. Find. Exp. Clin. Pharmacol., 1993, 13, 205). Microemulsions afford advantages of improved drug solubilization, protection of drug from enzymatic hydrolysis, possible enhancement of drug absorption due to surfactant-induced alterations in membrane fluidity and permeability, ease of preparation, ease of oral administration over solid dosage forms, improved clinical potency, and decreased toxicity (see e.g., U.S. Pat. Nos. 6,191,105; 7,063,860; 7,070,802; 7,157,099; Constantinides et al., Pharmaceutical Research, 1994, 11, 1385; Ho et al., J. Pharm. Sci., 1996, 85, 138-143). Often microemulsions can form spontaneously when their components are brought together at ambient temperature. This can be particularly advantageous when formulating thermolabile drugs, peptides or RNAi agents. Microemulsions have also been effective in the transdermal delivery of active components in both cosmetic and pharmaceutical applications. It is expected that the microemulsion compositions and formulations of the present disclosure will facilitate the increased systemic absorption of RNAi agents and nucleic acids from the gastrointestinal tract, as well as improve the local cellular uptake of RNAi agents and nucleic acids.

[0721] Microemulsions of the present disclosure can also contain additional components and additives such as sorbitan monostearate (Grill 3), Labrasol, and penetration enhancers to improve the properties of the formulation and to enhance the absorption of the RNAi agents and nucleic acids of the present disclosure. Penetration enhancers used in the microemulsions of the present disclosure can be classified as belonging to one of five broad categories—surfactants, fatty acids, bile salts, chelating agents, and non-chelating non-surfactants (Lee et al., Critical Reviews in Therapeutic Drug Carrier Systems, 1991, p. 92). Each of these classes has been discussed above.

### iii. Microparticles

[0722] An RNAi agent of the disclosure may be incorporated into a particle, e.g., a microparticle. Microparticles can be produced by spray-drying, but may also be produced by other methods including lyophilization, evaporation, fluid bed drying, vacuum drying, or a combination of these techniques.

[0723] iv. Penetration Enhancers

[0724] In one embodiment, the present disclosure employs various penetration enhancers to effect the efficient delivery of nucleic acids, particularly RNAi agents, to the skin of animals. Most drugs are present in solution in both ionized and nonionized forms. However, usually only lipid soluble or lipophilic drugs readily cross cell membranes. It has been discovered that even non-lipophilic drugs can cross cell membranes if the membrane to be crossed is treated with a penetration enhancer. In addition to aiding the diffusion of non-lipophilic drugs across cell membranes, penetration enhancers also enhance the permeability of lipophilic drugs.

[0725] Penetration enhancers can be classified as belonging to one of five broad categories, i.e., surfactants, fatty acids, bile salts, chelating agents, and non-chelating non-surfactants (see e.g., Malmsten, M. Surfactants and polymers in drug delivery, Informa Health Care, New York, NY, 2002; Lee et al., Critical Reviews in Therapeutic Drug Carrier Systems, 1991, p. 92). Each of the above-mentioned classes of penetration enhancers are described below in greater detail.

[0726] Surfactants (or “surface-active agents”) are chemical entities which, when dissolved in an aqueous solution, reduce the surface tension of the solution or the interfacial tension between the aqueous solution and another liquid, with the result that absorption of RNAi agents through the mucosa is enhanced. In addition to bile salts and fatty acids, these penetration enhancers include, for example, sodium lauryl sulfate, polyoxyethylene-9-lauryl ether and polyoxyethylene-20-cetyl ether) (see e.g., Malmsten, M. Surfactants and polymers in drug delivery, Informa Health Care, New York, NY, 2002; Lee et al., Critical Reviews in Therapeutic Drug Carrier Systems, 1991, p. 92); and perfluorochemical emulsions, such as FC-43. Takahashi et al., J. Pharm. Pharmacol., 1988, 40, 252).

[0727] Various fatty acids and their derivatives which act as penetration enhancers include, for example, oleic acid, lauric acid, capric acid (n-decanoic acid), myristic acid, palmitic acid, stearic acid, linoleic acid, linolenic acid, dicaprate, tricaprate, monoolein (1-monooleoyl-rac-glycerol), dilaurin, caprylic acid, arachidonic acid, glycerol 1-monocaprate, 1-dodecylazacycloheptan-2-one, acylcarnitines, acylcholines, C₁₋₂₀ alkyl esters thereof (e.g., methyl, isopropyl and t-butyl), and mono- and di-glycerides thereof (i.e., oleate, laurate, caprate, myristate, palmitate, stearate, linoleate, etc.) (see e.g., Touitou, E., et al. Enhancement in Drug Delivery, CRC Press, Danvers, M A, 2006; Lee et al., Critical Reviews in Therapeutic Drug Carrier Systems, 1991, p. 92; Muranishi, Critical Reviews in Therapeutic Drug Carrier Systems, 1990, 7, 1-33; El Hariri et al., J. Pharm. Pharmacol., 1992, 44, 651-654).

[0728] The physiological role of bile includes the facilitation of dispersion and absorption of lipids and fat-soluble vitamins (see e.g., Malmsten, M. Surfactants and polymers in drug delivery, Informa Health Care, New York, NY, 2002; Brunton, Chapter 38 in: Goodman & Gilman's The Pharmacological Basis of Therapeutics, 9th Ed., Hardman et al. Eds., McGraw-Hill, New York, 1996, pp. 934-935). Various natural bile salts, and their synthetic derivatives, act as penetration enhancers. Thus the term “bile salts” includes any of the naturally occurring components of bile as well as any of their synthetic derivatives. Suitable bile salts include, for example, cholic acid (or its pharmaceutically acceptable sodium salt, sodium cholate), dehydrocholic acid (sodium dehydrocholate), deoxycholic acid (sodium deoxycholate), glucholic acid (sodium glucholate), glycholic acid (sodium glycocholate), glycodeoxycholic acid (sodium glycodeoxycholate), taurocholic acid (sodium taurocholate), taurodeoxycholic acid (sodium taurodeoxycholate), chenodeoxycholic acid (sodium chenodeoxycholate), ursodeoxycholic acid (UDCA), sodium tauro-24,25-dihydro-fusidate (STDHF), sodium glycodihydrofusidate and polyoxyethylene-9-lauryl ether (POE) (see e.g., Malmsten, M. Surfactants and polymers in drug delivery, Informa Health Care, New York, NY, 2002; Lee et al., Critical Reviews in Therapeutic Drug Carrier Systems, 1991, page 92; Swinyard, Chapter 39 In: Remington's Pharmaceutical Sciences, 18th Ed., Gennaro, ed., Mack Publishing Co., Easton, Pa., 1990, pages 782-783; Muranishi, Critical Reviews in Therapeutic Drug Carrier Systems, 1990, 7, 1-33; Yamamoto et al., J. Pharm. Exp. Ther., 1992, 263, 25; Yamashita et al., J. Pharm. Sci., 1990, 79, 579-583).

[0729] Chelating agents, as used in connection with the present disclosure, can be defined as compounds that remove metallic ions from solution by forming complexes therewith, with the result that absorption of RNAi agents through the mucosa is enhanced. With regards to their use as penetration enhancers in the present disclosure, chelating agents have the added advantage of also serving as DNase inhibitors, as most characterized DNA nucleases require a divalent metal ion for catalysis and are thus inhibited by chelating agents (Jarrett, J. Chromatogr., 1993, 618, 315-339). Suitable chelating agents include but are not limited to disodium ethylenediaminetetraacetate (EDTA), citric acid, salicylates (e.g., sodium salicylate, 5-methoxysalicylate and homovanilate), N-acyl derivatives of collagen, laureth-9 and N-amino acyl derivatives of beta-diketones (enamines)(see e.g., Katdare, A. et al., Excipient development for pharmaceutical, biotechnology, and drug delivery, CRC Press, Danvers, M A, 2006; Lee et al., Critical Reviews in Therapeutic Drug Carrier Systems, 1991, page 92; Muranishi, Critical Reviews in Therapeutic Drug Carrier Systems, 1990, 7, 1-33; Buur et al., J. Control Rel., 1990, 14, 43-51).

[0730] As used herein, non-chelating non-surfactant penetration enhancing compounds can be defined as compounds that demonstrate insignificant activity as chelating agents or as surfactants but that nonetheless enhance absorption of RNAi agents through the alimentary mucosa (see e.g., Muranishi, Critical Reviews in Therapeutic Drug Carrier Systems, 1990, 7, 1-33). This class of penetration enhancers includes, for example, unsaturated cyclic ureas, 1-alkyl- and 1-alkenylazacyclo-alkanone derivatives (Lee et al., Critical Reviews in Therapeutic Drug Carrier Systems, 1991, page 92); and non-steroidal anti-inflammatory agents such as diclofenac sodium, indomethacin and phenylbutazone (Yamashita et al., J. Pharm. Pharmacol., 1987, 39, 621-626).

[0731] Agents that enhance uptake of RNAi agents at the cellular level can also be added to the pharmaceutical and other compositions of the present disclosure. For example, cationic lipids, such as lipofectin (Junichi et al, U.S. Pat. No. 5,705,188), cationic glycerol derivatives, and polycationic molecules, such as polylysine (WO 97/30731), are also known to enhance the cellular uptake of dsRNAs.

[0732] Other agents can be utilized to enhance the penetration of the administered nucleic acids, including glycols such as ethylene glycol and propylene glycol, pyrrols such as 2-pyrrol, azones, and terpenes such as limonene and menthone.

### vi. Excipients

[0733] In contrast to a carrier compound, a “pharmaceutical carrier” or “excipient” is a pharmaceutically acceptable solvent, suspending agent or any other pharmacologically inert vehicle for delivering one or more nucleic acids to an animal. The excipient can be liquid or solid and is selected, with the planned manner of administration in mind, so as to provide for the desired bulk, consistency, etc., when combined with a nucleic acid and the other components of a given pharmaceutical composition. Typical pharmaceutical carriers include, but are not limited to, binding agents (e.g., pregelatinized maize starch, polyvinylpyrrolidone or hydroxypropyl methylcellulose, etc.); fillers (e.g., lactose and other sugars, microcrystalline cellulose, pectin, gelatin, calcium sulfate, ethyl cellulose, polyacrylates or calcium hydrogen phosphate, etc.); lubricants (e.g., magnesium stearate, talc, silica, colloidal silicon dioxide, stearic acid, metallic stearates, hydrogenated vegetable oils, corn starch, polyethylene glycols, sodium benzoate, sodium acetate, etc.); disintegrants (e.g., starch, sodium starch glycolate, etc.); and wetting agents (e.g., sodium lauryl sulphate, etc).

[0734] Pharmaceutically acceptable organic or inorganic excipients suitable for non-parenteral administration which do not deleteriously react with nucleic acids can also be used to formulate the compositions of the present disclosure. Suitable pharmaceutically acceptable carriers include, but are not limited to, water, salt solutions, alcohols, polyethylene glycols, gelatin, lactose, amylose, magnesium stearate, talc, silicic acid, viscous paraffin, hydroxymethylcellulose, polyvinylpyrrolidone and the like.

[0735] Formulations for topical administration of nucleic acids can include sterile and non-sterile aqueous solutions, non-aqueous solutions in common solvents such as alcohols, or solutions of the nucleic acids in liquid or solid oil bases. The solutions can also contain buffers, diluents and other suitable additives. Pharmaceutically acceptable organic or inorganic excipients suitable for non-parenteral administration which do not deleteriously react with nucleic acids can be used.

[0736] Suitable pharmaceutically acceptable excipients include, but are not limited to, water, salt solutions, alcohol, polyethylene glycols, gelatin, lactose, amylose, magnesium stearate, talc, silicic acid, viscous paraffin, hydroxymethylcellulose, polyvinylpyrrolidone and the like.

### vii. Other Components

[0737] The compositions of the present disclosure can additionally contain other adjunct components conventionally found in pharmaceutical compositions, at their art-established usage levels. Thus, for example, the compositions can contain additional, compatible, pharmaceutically-active materials such as, for example, antipruritics, astringents, local anesthetics or anti-inflammatory agents, or can contain additional materials useful in physically formulating various dosage forms of the compositions of the present disclosure, such as dyes, flavoring agents, preservatives, antioxidants, opacifiers, thickening agents and stabilizers. However, such materials, when added, should not unduly interfere with the biological activities of the components of the compositions of the present disclosure. The formulations can be sterilized and, if desired, mixed with auxiliary agents, e.g., lubricants, preservatives, stabilizers, wetting agents, emulsifiers, salts for influencing osmotic pressure, buffers, colorings, flavorings or aromatic substances and the like which do not deleteriously interact with the nucleic acid(s) of the formulation.

[0738] Aqueous suspensions can contain substances which increase the viscosity of the suspension including, for example, sodium carboxymethylcellulose, sorbitol or dextran. The suspension can also contain stabilizers.

[0739] In some embodiments, pharmaceutical compositions featured in the disclosure include (a) one or more RNAi agents and (b) one or more agents which function by a non-RNAi mechanism and which are useful in treating an ATXN2-associated neurodegenerative disorder. Examples of such agents include, but are not lmited to SSRIs, venlafaxine, bupropion, and atypical antipsychotics.

[0740] Toxicity and therapeutic efficacy of such compounds can be determined by standard pharmaceutical procedures in cell cultures or experimental animals, e.g., for determining the LD₅₀ (the dose lethal to 50% of the population) and the ED₅₀ (the dose therapeutically effective in 50% of the population). The dose ratio between toxic and therapeutic effects is the therapeutic index and it can be expressed as the ratio LD₅₀/ED₅₀. Compounds that exhibit high therapeutic indices are preferred.

[0741] The data obtained from cell culture assays and animal studies can be used in formulating a range of dosage for use in humans. The dosage of compositions featured herein in the disclosure lies generally within a range of circulating concentrations that include the ED₅₀ with little or no toxicity. The dosage can vary within this range depending upon the dosage form employed and the route of administration utilized. For any compound used in the methods featured in the disclosure, the therapeutically effective dose can be estimated initially from cell culture assays. A dose can be formulated in animal models to achieve a circulating plasma concentration range of the compound or, when appropriate, of the polypeptide product of a target sequence (e.g., achieving a decreased concentration of the polypeptide) that includes the IC₅₀ (i.e., the concentration of the test compound which achieves a half-maximal inhibition of symptoms) as determined in cell culture. Such information can be used to more accurately determine useful doses in humans. Levels in plasma can be measured, for example, by high performance liquid chromatography.

[0742] In addition to their administration, as discussed above, the RNAi agents featured in the disclosure can be administered in combination with other known agents effective in treatment of pathological processes mediated by nucleotide repeat expression. In any event, the administering physician can adjust the amount and timing of RNAi agent administration on the basis of results observed using standard measures of efficacy known in the art or described herein.

### VII. Kits

[0743] In certain aspects, the instant disclosure provides kits that include a suitable container containing a pharmaceutical formulation of a siRNA compound, e.g., a double-stranded siRNA compound, or siRNA compound, (e.g., a precursor, e.g., a larger siRNA compound which can be processed into a siRNA compound, or a DNA which encodes an siRNA compound, e.g., a double-stranded siRNA compound, or siRNA compound, or precursor thereof). In certain embodiments the individual components of the pharmaceutical formulation may be provided in one container. Alternatively, it may be desirable to provide the components of the pharmaceutical formulation separately in two or more containers, e.g., one container for a siRNA compound preparation, and at least another for a carrier compound. The kit may be packaged in a number of different configurations such as one or more containers in a single box. The different components can be combined, e.g., according to instructions provided with the kit. The components can be combined according to a method described herein, e.g., to prepare and administer a pharmaceutical composition. The kit can also include a delivery device.

### VIII. Methods for Inhibiting ATXN2 Expression

[0744] The present disclosure also provides methods of inhibiting expression of an ATXN2 gene in a cell. The methods include contacting a cell with an RNAi agent, e.g., double stranded RNAi agent, in an amount effective to inhibit expression of ATXN2 in the cell, thereby inhibiting expression of ATXN2 in the cell. In certain embodiments of the disclosure, ATXN2 is inhibited preferentially in CNS (e.g., brain) cells. In other embodiments of the disclosure, ATXN2 is inhibited preferentially in the liver (e.g., hepatocytes). In certain embodiments of the disclosure, ATXN2 is inhibited in CNS (e.g., brain) cells and in liver (e.g., hepatocytes) cells.

[0745] Contacting of a cell with an RNAi agent, e.g., a double stranded RNAi agent, may be done in vitro or in vivo. Contacting a cell in vivo with the RNAi agent includes contacting a cell or group of cells within a subject, e.g., a human subject, with the RNAi agent. Combinations of in vitro and in vivo methods of contacting a cell are also possible.

[0746] Contacting a cell may be direct or indirect, as discussed above. Furthermore, contacting a cell may be accomplished via a targeting ligand, including any ligand described herein or known in the art. In some embodiments, the targeting ligand is a carbohydrate moiety, e.g., a GalNAc ligand, or any other ligand that directs the RNAi agent to a site of interest.

[0747] The term “inhibiting,” as used herein, is used interchangeably with “reducing,” “silencing,” “downregulating,” “suppressing” and other similar terms, and includes any level of inhibition. In certain embodiments, a level of inhibition, e.g., for an RNAi agent of the instant disclosure, can be assessed in cell culture conditions, e.g., wherein cells in cell culture are transfected via Lipofectamine™-mediated transfection at a concentration in the vicinity of a cell of 10 nM or less, 1 nM or less, etc. Knockdown of a given RNAi agent can be determined via comparison of pre-treated levels in cell culture versus post-treated levels in cell culture, optionally also comparing against cells treated in parallel with a scrambled or other form of control RNAi agent. Knockdown in cell culture of, e.g., optionally 50% or more, can thereby be identified as indicative of “inhibiting” or “reducing”, “downregulating” or “suppressing”, etc. having occurred. It is expressly contemplated that assessment of targeted mRNA or encoded protein levels (and therefore an extent of “inhibiting”, etc. caused by an RNAi agent of the disclosure) can also be assessed in in vivo systems for the RNAi agents of the instant disclosure, under properly controlled conditions as described in the art.

[0748] The phrase “inhibiting expression of an ATXN2 gene” or “inhibiting expression of ATXN2,” as used herein, includes inhibition of expression of any ATXN2 gene (such as, e.g., a mouse ATXN2 gene, a rat ATXN2 gene, a monkey ATXN2 gene, or a human ATXN2 gene) as well as variants or mutants of an ATXN2 gene that encode an ATXN2 protein. Thus, the ATXN2 gene may be a wild-type ATXN2 gene, a mutant ATXN2 gene, or a transgenic ATXN2 gene in the context of a genetically manipulated cell, group of cells, or organism.

[0749] “Inhibiting expression of an ATXN2 gene” includes any level of inhibition of an ATXN2 gene, e.g., at least partial suppression of the expression of an ATXN2 gene, such as an inhibition by at least 20%. In certain embodiments, inhibition is by at least 30%, at least 40%, optionally at least 50%, at least about 60%, at least 70%, at least about 80%, at least 85%, at least 90%, at least 95%, at least 96%, at least 97%, at least 98%, or at least 99%; or to below the level of detection of the assay method.

[0750] The expression of an ATXN2 gene may be assessed based on the level of any variable associated with ATXN2 gene expression, e.g., ATXN2 mRNA level or ATXN2 protein level, or, for example, the level of neuroinflammation, e.g., microglial and astrocyte activation, and ATXN2 deposition in areas of the brain associated with neuronal cell death.

[0751] Inhibition may be assessed by a decrease in an absolute or relative level of one or more of these variables compared with a control level. The control level may be any type of control level that is utilized in the art, e.g., a pre-dose baseline level, or a level determined from a similar subject, cell, or sample that is untreated or treated with a control (such as, e.g., buffer only control or inactive agent control).

[0752] In some embodiments of the methods of the disclosure, expression of an ATXN2 gene is inhibited by at least 20%, 30%, 40%, optionally at least 50%, 60%, 70%, 80%, 85%, 90%, or 95%, or to below the level of detection of the assay. In certain embodiments, the methods include a clinically relevant inhibition of expression of ATXN2, e.g. as demonstrated by a clinically relevant outcome after treatment of a subject with an agent to reduce the expression of ATXN2.

[0753] Inhibition of the expression of an ATXN2 gene may be manifested by a reduction of the amount of mRNA expressed by a first cell or group of cells (such cells may be present, for example, in a sample derived from a subject) in which an ATXN2 gene is transcribed and which has or have been treated (e.g., by contacting the cell or cells with an RNAi agent of the disclosure, or by administering an RNAi agent of the disclosure to a subject in which the cells are or were present) such that the expression of an ATXN2 gene is inhibited, as compared to a second cell or group of cells substantially identical to the first cell or group of cells but which has not or have not been so treated (control cell(s) not treated with an RNAi agent or not treated with an RNAi agent targeted to the gene of interest). The degree of inhibition may be expressed in terms of:

$$\frac{( mRNA in control cells ) - ( mRNA in treated cells )}{( mRNA in control cells )} •100 \%$$

[0754] In other embodiments, inhibition of the expression of an ATXN2 gene may be assessed in terms of a reduction of a parameter that is functionally linked to an ATXN2 gene expression, e.g., ATXN2 protein expression. ATXN2 gene silencing may be determined in any cell expressing ATXN2, either endogenous or heterologous from an expression construct, and by any assay known in the art.

[0755] Inhibition of the expression of an ATXN2 protein may be manifested by a reduction in the level of the ATXN2 protein that is expressed by a cell or group of cells (e.g., the level of protein expressed in a sample derived from a subject). As explained above, for the assessment of mRNA suppression, the inhibiton of protein expression levels in a treated cell or group of cells may similarly be expressed as a percentage of the level of protein in a control cell or group of cells.

[0756] A control cell or group of cells that may be used to assess the inhibition of the expression of an ATXN2 gene includes a cell or group of cells that has not yet been contacted with an RNAi agent of the disclosure. For example, the control cell or group of cells may be derived from an individual subject (e.g., a human or animal subject) prior to treatment of the subject with an RNAi agent.

[0757] The level of ATXN2 mRNA that is expressed by a cell or group of cells may be determined using any method known in the art for assessing mRNA expression. In one embodiment, the level of expression of ATXN2 in a sample is determined by detecting a transcribed polynucleotide, or portion thereof, e.g., mRNA of the ATXN2 gene. RNA may be extracted from cells using RNA extraction techniques including, for example, using acid phenol/guanidine isothiocyanate extraction (RNAzol B; Biogenesis), RNeasy™ RNA preparation kits (Qiagen®) or PAXgene (PreAnalytix, Switzerland). Typical assay formats utilizing ribonucleic acid hybridization include nuclear run-on assays, RT-PCR, RNase protection assays, northern blotting, in situ hybridization, and microarray analysis. Circulating ATXN2 mRNA may be detected using methods the described in WO2012/177906, the entire contents of which are hereby incorporated herein by reference.

[0758] In some embodiments, the level of expression of ATXN2 is determined using a nucleic acid probe. The term “probe”, as used herein, refers to any molecule that is capable of selectively binding to a specific ATXN2 nucleic acid or protein, or fragment thereof. Probes can be synthesized by one of skill in the art, or derived from appropriate biological preparations. Probes may be specifically designed to be labeled. Examples of molecules that can be utilized as probes include, but are not limited to, RNA, DNA, proteins, antibodies, and organic molecules.

[0759] Isolated mRNA can be used in hybridization or amplification assays that include, but are not limited to, Southern or northern analyses, polymerase chain reaction (PCR) analyses and probe arrays. One method for the determination of mRNA levels involves contacting the isolated mRNA with a nucleic acid molecule (probe) that can hybridize to ATXN2 mRNA. In one embodiment, the mRNA is immobilized on a solid surface and contacted with a probe, for example by running the isolated mRNA on an agarose gel and transferring the mRNA from the gel to a membrane, such as nitrocellulose. In an alternative embodiment, the probe(s) are immobilized on a solid surface and the mRNA is contacted with the probe(s), for example, in an Affymetrix© gene chip array. A skilled artisan can readily adapt known mRNA detection methods for use in determining the level of ATXN2 mRNA.

[0760] An alternative method for determining the level of expression of ATXN2 in a sample involves the process of nucleic acid amplification or reverse transcriptase (to prepare cDNA) of for example mRNA in the sample, e.g., by RT-PCR (the experimental embodiment set forth in Mullis, 1987, U.S. Pat. No. 4,683,202), ligase chain reaction (Barany (1991) Proc. Natl. Acad. Sci. USA 88: 189-193), self-sustained sequence replication (Guatelli et al. (1990) Proc. Natl. Acad. Sci. USA 87: 1874-1878), transcriptional amplification system (Kwoh et al. (1989) Proc. Natl. Acad. Sci. USA 86: 1173-1177), Q-Beta Replicase (Lizardi et al. (1988) Bio Technology 6: 1197), rolling circle replication (Lizardi et al., U.S. Pat. No. 5,854,033) or any other nucleic acid amplification method, followed by the detection of the amplified molecules using techniques well known to those of skill in the art. These detection schemes are especially useful for the detection of nucleic acid molecules if such molecules are present in very low numbers. In particular aspects of the disclosure, the level of expression of ATXN2 is determined by quantitative fluorogenic RT-PCR (i.e., the TaqMan™ System), by a Dual-Glo® Luciferase assay, or by other art-recognized method for measurement of ATXN2 expression or mRNA level.

[0761] The expression level of ATXN2 mRNA may be monitored using a membrane blot (such as used in hybridization analysis such as northern, Southern, dot, and the like), or microwells, sample tubes, gels, beads or fibers (or any solid support comprising bound nucleic acids). See U.S. Pat. Nos. 5,770,722, 5,874,219, 5,744,305, 5,677,195 and 5,445,934, which are incorporated herein by reference. The determination of ATXN2 expression level may also comprise using nucleic acid probes in solution.

[0762] In some embodiments, the level of mRNA expression is assessed using branched DNA (bDNA) assays or real time PCR (qPCR). The use of this PCR method is described and exemplified in the Examples presented herein. Such methods can also be used for the detection of ATXN2 nucleic acids.

[0763] The level of ATXN2 protein expression may be determined using any method known in the art for the measurement of protein levels. Such methods include, for example, electrophoresis, capillary electrophoresis, high performance liquid chromatography (HPLC), thin layer chromatography (TLC), hyperdiffusion chromatography, fluid or gel precipitin reactions, absorption spectroscopy, a colorimetric assays, spectrophotometric assays, flow cytometry, immunodiffusion (single or double), immunoelectrophoresis, western blotting, radioimmunoassay (RIA), enzyme-linked immunosorbent assays (ELISAs), immunofluorescent assays, electrochemiluminescence assays, and the like. Such assays can also be used for the detection of proteins indicative of the presence or replication of ATXN2 proteins.

[0764] In some embodiments, the efficacy of the methods of the disclosure in the treatment of an ATXN2-related disease is assessed by a decrease in ATXN2 mRNA level (e.g, by assessment of a CSF sample for ATXN2 level, by brain biopsy, or otherwise).

[0765] In some embodiments, the efficacy of the methods of the disclosure in the treatment of an ATXN2-related disease is assessed by a decrease in ATXN2 mRNA level (e.g, by assessment of a liver sample for ATXN2 level, by biopsy, or otherwise).

[0766] In some embodiments of the methods of the disclosure, the RNAi agent is administered to a subject such that the RNAi agent is delivered to a specific site within the subject. The inhibition of expression of ATXN2 may be assessed using measurements of the level or change in the level of ATXN2 mRNA or ATXN2 protein in a sample derived from a specific site within the subject, e.g., CNS cells. In certain embodiments, the methods include a clinically relevant inhibition of expression of ATXN2, e.g. as demonstrated by a clinically relevant outcome after treatment of a subject with an agent to reduce the expression of ATXN2.

[0767] As used herein, the terms detecting or determining a level of an analyte are understood to mean performing the steps to determine if a material, e.g., protein, RNA, is present. As used herein, methods of detecting or determining include detection or determination of an analyte level that is below the level of detection for the method used.

### IX. Methods of Treating or Preventing ATXN2-Associated Neurodegenerative Diseases

[0768] The present disclosure also provides methods of using an RNAi agent of the disclosure or a composition containing an RNAi agent of the disclosure to reduce or inhibit ATXN2 expression in a cell. The methods include contacting the cell with a dsRNA of the disclosure and maintaining the cell for a time sufficient to obtain degradation of the mRNA transcript of an ATXN2 gene, thereby inhibiting expression of the ATXN2 gene in the cell. Reduction in gene expression can be assessed by any methods known in the art. For example, a reduction in the expression of ATXN2 may be determined by determining the mRNA expression level of ATXN2 using methods routine to one of ordinary skill in the art, e.g., northern blotting, qRT-PCR; by determining the protein level of ATXN2 using methods routine to one of ordinary skill in the art, such as western blotting, immunological techniques.

[0769] In the methods of the disclosure the cell may be contacted in vitro or in vivo, i.e., the cell may be within a subject.

[0770] A cell suitable for treatment using the methods of the disclosure may be any cell that expresses an ATXN2 gene. A cell suitable for use in the methods of the disclosure may be a mammalian cell, e.g., a primate cell (such as a human cell or a non-human primate cell, e.g., a monkey cell or a chimpanzee cell), a non-primate cell (such as a a rat cell, or a mouse cell. In one embodiment, the cell is a human cell, e.g., a human CNS cell. In one embodiment, the cell is a human cell, e.g., a human liver cell. In one embodiment, the cell is a human cell, e.g., a human CNS cell and a human liver cell.

[0771] ATXN2 expression is inhibited in the cell by at least about 30, 40, 50, 55, 60, 65, 70, 75, 80, 85, 90, 95, 96, 97, 98, 99, or about 100%, i.e., to below the level of detection. In preferred embodiments, ATXN2 expression is inhibited by at least 50%.

[0772] The in vivo methods of the disclosure may include administering to a subject a composition containing an RNAi agent, where the RNAi agent includes a nucleotide sequence that is complementary to at least a part of an RNA transcript of the ATXN2 gene of the mammal to be treated. When the organism to be treated is a mammal such as a human, the composition can be administered by any means known in the art including, but not limited to oral, intraperitoneal, or parenteral routes, including intracranial (e.g., intraventricular, intraparenchymal, and intrathecal), intravenous, intramuscular, intravitreal, subcutaneous, transdermal, airway (aerosol), nasal, rectal, and topical (including buccal and sublingual) administration. In certain embodiments, the compositions are administered by intravenous infusion or injection. In certain embodiments, the compositions are administered by subcutaneous injection. In certain embodiments, the compositions are administered by intrathecal injection.

[0773] In some embodiments, the administration is via a depot injection. A depot injection may release the RNAi agent in a consistent way over a prolonged time period. Thus, a depot injection may reduce the frequency of dosing needed to obtain a desired effect, e.g., a desired inhibition of ATXN2, or a therapeutic or prophylactic effect. A depot injection may also provide more consistent serum concentrations. Depot injections may include subcutaneous injections or intramuscular injections. In preferred embodiments, the depot injection is a subcutaneous injection.

[0774] In some embodiments, the administration is via a pump. The pump may be an external pump or a surgically implanted pump. In certain embodiments, the pump is a subcutaneously implanted osmotic pump. In other embodiments, the pump is an infusion pump. An infusion pump may be used for intracranial, intravenous, subcutaneous, arterial, or epidural infusions. In preferred embodiments, the infusion pump is a subcutaneous infusion pump. In other embodiments, the pump is a surgically implanted pump that delivers the RNAi agent to the CNS.

[0775] The mode of administration may be chosen based upon whether local or systemic treatment is desired and based upon the area to be treated. The route and site of administration may be chosen to enhance targeting.

[0776] In one aspect, the present disclosure also provides methods for inhibiting the expression of an ATXN2 gene in a mammal. The methods include administering to the mammal a composition comprising a dsRNA that targets an ATXN2 gene in a cell of the mammal and maintaining the mammal for a time sufficient to obtain degradation of the mRNA transcript of the ATXN2 gene, thereby inhibiting expression of the ATXN2 gene in the cell. Reduction in gene expression can be assessed by any methods known it the art and by methods, e.g. qRT-PCR, described herein. Reduction in protein production can be assessed by any methods known it the art and by methods, e.g. ELISA, described herein. In one embodiment, a CNS biopsy sample or a cerebrospinal fluid (CSF) sample serves as the tissue material for monitoring the reduction in ATXN2 gene or protein expression (or of a proxy therefore).

[0777] The present disclosure further provides methods of treatment of a subject in need thereof. The treatment methods of the disclosure include administering an RNAi agent of the disclosure to a subject, e.g., a subject that would benefit from inhibition of ATXN2 expression, in a therapeutically effective amount of an RNAi agent targeting an ATXN2 gene or a pharmaceutical composition comprising an RNAi agent targeting an ATXN2 gene.

[0778] In addition, the present disclosure provides methods of preventing, treating or inhibiting the progression of an ATXN2-associated neurodegenerative disease or disorder, such as a spinocerebellar ataxia (SCA), such as spinocerebellar ataxia 2 (SCA2), or Amyotrophic Lateral Sclerosis (ALS).

[0779] The methods include administering to the subject a therapeutically effective amount of any of the RNAi agent, e.g., dsRNA agents, or the pharmaceutical composition provided herein, thereby preventing, treating or inhibiting the progression of the ATXN2-associated neurodegenerative disease or disorder in the subject.

[0780] An RNAi agent of the disclosure may be administered as a “free RNAi agent.” A free RNAi agent is administered in the absence of a pharmaceutical composition. The naked RNAi agent may be in a suitable buffer solution. The buffer solution may comprise acetate, citrate, prolamine, carbonate, or phosphate, or any combination thereof. In one embodiment, the buffer solution is phosphate buffered saline (PBS). The pH and osmolarity of the buffer solution containing the RNAi agent can be adjusted such that it is suitable for administering to a subject.

[0781] Alternatively, an RNAi agent of the disclosure may be administered as a pharmaceutical composition, such as a dsRNA liposomal formulation.

[0782] Subjects that would benefit from a reduction or inhibition of ATXN2 gene expression are those having an ATXN2-associated neurodegenerative disease.

[0783] The disclosure further provides methods for the use of an RNAi agent or a pharmaceutical composition thereof, e.g., for treating a subject that would benefit from reduction or inhibition of ATXN2 expression, e.g., a subject having an ATXN2-associated neurodegenerative disorder, in combination with other pharmaceuticals or other therapeutic methods, e.g., with known pharmaceuticals or known therapeutic methods, such as, for example, those which are currently employed for treating these disorders. For example, in certain embodiments, an RNAi agent targeting ATXN2 is administered in combination with, e.g., an agent useful in treating an ATXN2-associated neurodegenerative disorder as described elsewhere herein or as otherwise known in the art. For example, additional agents and treatments suitable for treating a subject that would benefit from reducton in ATXN2 expression, e.g., a subject having an ATXN2-associated neurodegenerative disorder, may include agents currently used to treat symptoms of ATXN2. The RNAi agent and additional therapeutic agents may be administered at the same time or in the same combination, e.g., intrathecally, or the additional therapeutic agent can be administered as part of a separate composition or at separate times or by another method known in the art or described herein.

[0784] Exemplary additional therapeutics and treatments include, for example, sedatives, antidepressants, clonazepam, sodium valproate, opiates, antiepileptic drugs, cholinesterase inhibitors, memantine, benzodiazepines, levodopa, COMT inhibitors (e.g., tolcapone and entacapone), dopamine agonists (e.g., bronocriptine, pergolide, pramipexole, ropinirole, piribedil, cabergoline, apomorphine and lisuride), MAO-B inhibitors (e.g., safinamide, selegiline and rasagiline), amantadine, an anticholinergic, modafinil, pirnavanserin, doxepin, rasagline, an antipsychotic, an atypical antipsychotic (e.g., amisuilpride, olanzapine, risperidone, and clozapine), riluzole, edaravone, deep brain stimulation, non-invasive ventilation (NIV), invasive ventilation physical therapy, occupational therapy, speech therapy, dietary changes and swallowing technique a feeding tube, a PEG tube, probiotics, and psychological therapy.

[0785] In one embodiment, the method includes administering a composition featured herein such that expression of the target ATXN2 gene is decreased, for at least one month. In certain embodiments, expression is decreased for at least 2 months, 3 months, or 6 months.

[0786] Optionally, the RNAi agents useful for the methods and compositions featured herein specifically target RNAs (primary or processed) of the target ATXN2 gene. Compositions and methods for inhibiting the expression of these genes using RNAi agents can be prepared and performed as described herein.

[0787] Administration of the dsRNA according to the methods of the disclosure may result in a reduction of the severity, signs, symptoms, or markers of such diseases or disorders in a patient with an ATXN2-associated neurodegenerative disorder. By “reduction” in this context is meant a statistically significant or clinically significant decrease in such level. The reduction can be, for example, at least 5%, 10%, 15%, 20%, 25%, 30%, 35%, 40%, 45%, 50%, 55%, 60%, 65%, 70%, 75%, 80%, 85%, 90%, 95%, or about 100%.

[0788] Efficacy of treatment or prevention of disease can be assessed, for example by measuring disease progression, disease remission, symptom severity, reduction in pain, quality of life, dose of a medication required to sustain a treatment effect, level of a disease marker or any other measurable parameter appropriate for a given disease being treated or targeted for prevention. It is well within the ability of one skilled in the art to monitor efficacy of treatment or prevention by measuring any one of such parameters, or any combination of parameters. For example, efficacy of treatment of an ATXN2-associated neurodegenerative disorder may be assessed, for example, by periodic monitoring of a subject's cognition, learning, or memory. Comparisons of the later readings with the initial readings provide a physician an indication of whether the treatment is effective. It is well within the ability of one skilled in the art to monitor efficacy of treatment or prevention by measuring any one of such parameters, or any combination of parameters. In connection with the administration of an RNAi agent targeting ATXN2 or pharmaceutical composition thereof, “effective against” an ATXN2-associated neurodegenerative disorder indicates that administration in a clinically appropriate manner results in a beneficial effect for at least a statistically significant fraction of patients, such as an improvement of symptoms, a cure, a reduction in disease, extension of life, improvement in quality of life, or other effect generally recognized as positive by medical doctors familiar with treating ATXN2-associated neurodegenerative disorders and the related causes.

[0789] A treatment or preventive effect is evident when there is a statistically significant improvement in one or more parameters of disease status, or by a failure to worsen or to develop symptoms where they would otherwise be anticipated. As an example, a favorable change of at least 10% in a measurable parameter of disease, and optionally at least 20%, 30%, 40%, 50% or more can be indicative of effective treatment. Efficacy for a given RNAi agent drug or formulation of that drug can also be judged using an experimental animal model for the given disease as known in the art. When using an experimental animal model, efficacy of treatment is evidenced when a statistically significant reduction in a marker or symptom is observed.

[0790] Alternatively, the efficacy can be measured by a reduction in the severity of disease as determined by one skilled in the art of diagnosis based on a clinically accepted disease severity grading scale. Any positive change resulting in e.g., lessening of severity of disease measured using the appropriate scale, represents adequate treatment using an RNAi agent or RNAi agent formulation as described herein.

[0791] Subjects can be administered a therapeutic amount of dsRNA, such as about 0.01 mg/kg to about 200 mg/kg.

[0792] The RNAi agent can be administered intrathecally, via intravitreal injection, or by intravenous infusion over a period of time, on a regular basis. In certain embodiments, after an initial treatment regimen, the treatments can be administered on a less frequent basis. Administration of the RNAi agent can reduce ATXN2 levels, e.g., in a cell, tissue, blood, CSF sample or other compartment of the patient by at least 20%, 30%, 40%, 50%, 55%, 60%, 65%, 70,% 75%, 80%, 85%, 90%, 95%, 96%, 97%, 98%, or at least about 99% or more. In a preferred embodiment, administration of the RNAi agent can reduce ATXN2 levels, e.g., in a cell, tissue, blood, CSF sample or other compartment of the patient by at least 50%.

[0793] Before administration of a full dose of the RNAi agent, patients can be administered a smaller dose, such as a 5% infusion reaction, and monitored for adverse effects, such as an allergic reaction. In another example, the patient can be monitored for unwanted immunostimulatory effects, such as increased cytokine (e.g., TNF-alpha or INF-alpha) levels.

[0794] Alternatively, the RNAi agent can be administered subcutaneously, i.e., by subcutaneous injection. One or more injections may be used to deliver the desired, e.g., monthly dose of RNAi agent to a subject. The injections may be repeated over a period of time. The administration may be repeated on a regular basis. In certain embodiments, after an initial treatment regimen, the treatments can be administered on a less frequent basis. A repeat-dose regimine may include administration of a therapeutic amount of RNAi agent on a regular basis, such as monthly or extending to once a quarter, twice per year, once per year. In certain embodiments, the RNAi agent is administered about once per month to about once per quarter (i.e., about once every three months).

[0795] Unless otherwise defined, all technical and scientific terms used herein have the same meaning as commonly understood by one of ordinary skill in the art to which this invention belongs. Although methods and materials similar or equivalent to those described herein can be used in the practice or testing of the RNAi agents and methods featured in the invention, suitable methods and materials are described below. All publications, patent applications, patents, and other references mentioned herein are incorporated by reference in their entirety. In case of conflict, the present specification, including definitions, will control. In addition, the materials, methods, and examples are illustrative only and not intended to be limiting.

[0796] An informal Sequence Listing is also filed herewith and forms part of the specification as filed.

### EXAMPLES

### Example 1: Materials and Methods

### Bioinformatics

[0797] A set of siRNAs targeting the human ataxin 2 gene (ATXN2; human NCBI refseqID NM_002973.3; NCBI GeneID: 6311; SEQ ID NO: 1) as well the toxicology-species ATXN2 (XM_005572266.1; SEQ ID NO: 3) orthologs from cynomolgus monkey were designed using custom R and Python scripts. All the siRNA were designed to have a perfect match to the human ATXN2 transcripts and a subset either perfect or near-perfect matches to the cynomolgus monkey ortholog. The human ATXN2 NM_002973 REFSEQ mRNA, version 3 (SEQ ID NO: 1), has a length of 4712 bases. The rationale and method for the set of siRNA designs follows. The predicted efficacy for every potential 23mer siRNA from position 10 through the end was determined with a random forest model derived from the direct measure of mRNA knockdown from several thousand distinct siRNA designs targeting a diverse set of vertebrate genes. For each strand of the siRNA, a custom Python script was used in a brute force search to measure the number and positions of mismatches between the siRNA and all potential alignments in the human transcriptome. Extra weight was given to mismatches in the seed region, defined here as positions 2-9 of the antisense oligonucleotide, as well the cleavage site of the siRNA, defined here as positions 10-11 of the antisense oligonucleotide. The relative weight of the mismatches was 2.8, 1.2, 1 for seed mismatches, cleavage site, and other positions up through antisense position 19. Mismatches in the first position were ignored. A specificity score was calculated for each strand by summing the value of each weighted mismatch. Preference was given to siRNAs whose antisense score in human and cynomolgus monkey was >=2 and predicted efficacy was >=50% knockdown.

### In Vitro Screening—Dual-Glo® Luciferase Assay

[0798] Cos-7 cells (ATCC, Manassas, VA) were grown to near confluence at 37° C. in an atmosphere of 5% CO2 in DMEM (ATCC) supplemented with 10% FBS, before being released from the plate by trypsinization. Multi-dose experiments were performed at 10 nM and 0.1 nM. siRNA and psiCHECK2-ATXN2 (NM_002973) plasmid transfections were carried out with a plasmid containing the 3′ untranslated region (UTR). Transfection was carried out by adding 5 μL of siRNA duplexes and 5 μL (5 ng) of psiCHECK2 plasmid per well along with 4.9 μL of Opti-MEM plus 0.1 μL of Lipofectamine 2000 per well (Invitrogen, Carlsbad CA. cat #13778-150) and then incubated at room temperature for 15 minutes. The mixture was then added to the cells which were re-suspended in 35 μL of fresh complete media. The transfected cells were incubated at 37° C. in an atmosphere of 5% CO2.

[0799] Forty-eight hours after the siRNAs and psiCHECK2 plasmid were transfected, Firefly (transfection control) and Renilla (fused to ATXN2 target sequence) luciferase were measured. First, media was removed from cells. Then Firefly luciferase activity was measured by adding a mixture of 20 μL Dual-Glo® Luciferase Reagent and 20 μL DMEM to each well. The mixture was incubated at room temperature for 30 minutes before luminescense (500 nm) was measured on a Spectramax (Molecular Devices) to detect the Firefly luciferase signal. Renilla luciferase activity was measured by adding a mixture of 20 μL of room temperature of Dual-Glo® Stop & Glo® Buffer and 0.1 μL Dual-Glo® Stop & Glo® Substrate to each well and the plates were incubated for 10-15 minutes before luminescence was again measured to determine the Renilla luciferase signal. The Dual-Glo® Stop & Glo® mixture quenches the firefly luciferase signal and sustained luminescence for the Renilla luciferase reaction. siRNA activity was determined by normalizing the Renilla (ATXN2) signal to the Firefly (control) signal within each well. The magnitude of siRNA activity was then assessed relative to cells that were transfected with the same vector but were not treated with siRNA or were treated with a non-targeting siRNA. All transfections were done with n=4.

### In Vitro Screening—Cell Culture and Transfections

[0800] Cells were transfected by adding 4.9 μL of Opti-MEM plus 0.1 μL of RNAiMAX per well (Invitrogen, Carlsbad CA. cat #13778-150) to 5 μL of siRNA duplexes per well, with 4 replicates of each siRNA duplex, into a 384-well plate, and incubated at room temperature for 15 minutes. 40 μL of MEDIA containing ˜5×103 cells were then added to the siRNA mixture. Cells were incubated for 24 hours prior to RNA purification. Experiments were performed at 10 nM and 0.1 nM. Transfection experiments were performed in human hepatoma HeP³B cells (ATCC HB-8064) with EMEM (ATCC catalog no. 30-2003), human neuroblastoma BE(2)-C cells (ATCC CRL-2268) with EMEM:F12 media (Gibco catalog no. 11765054) and mouse neuroblastoma Neuro-2A cells (ATCC CCL-131) with EMEM media.

In Vitro Screening—Total RNA Isolation Using DYNABEADS mRNA Isolation Kit

[0801] RNA was isolated using an automated protocol on a BioTek-EL406 platform using DYNABEADs (Invitrogen, cat #61012). Briefly, 70 μL of Lysis/Binding Buffer and 10 μL of lysis buffer containing 3 μL of magnetic beads were added to the plate with cells. Plates were incubated on an electromagnetic shaker for 10 minutes at room temperature and then magnetic beads were captured and the supernatant was removed. Bead-bound RNA was then washed 2 times with 150 μL Wash Buffer A and once with Wash Buffer B. Beads were then washed with 150 μL Elution Buffer, re-captured and supernatant removed.

### In Vitro Screening—cDNA Synthesis Using ABI High Capacity cDNA Reverse Transcription Kit (Applied Biosystems, Foster City, CA, Cat #4368813)

[0802] 12 μL of a master mix containing 1.2 μL 10× Buffer, 0.48 μL 25× dNTPs, 1.2 μL 10× Random primers, 0.6 μL Reverse Transcriptase, 0.6 μL RNase inhibitor and 7.92 μL of H2O per reaction was added to the bead bound RNA isolated above. Plates were sealed, mixed, and incubated on an electromagnetic shaker for 10 minutes at room temperature, followed by 2 h incubation at 37° C.

### In Vitro Screening—Real Time PCR

[0803] 2 μL of cDNA were added to a master mix containing 0.5 μL of human or mouse GAPDH TaqMan Probe (ThermoFisher cat 4352934 E or 4351309) and 0.5 μL of appropriate ATXN2 probe (Thermo Fisher Taqman human: Hs00268077, mouse: Mm00485946) and 5 μL Lightcycler 480 probe master mix (Roche Cat #04887301001) per well in a 384 well plates (Roche cat #04887301001). Real time PCR was done in a LightCycler480 Real Time PCR system (Roche). Each duplex was tested with N=4 and data were normalized to cells transfected with a non-targeting control siRNA. To calculate relative fold change, real time data were analyzed using the AACt method and normalized to assays performed with cells transfected with a non-targeting control siRNA.

### In Vivo Evaluation of ATXN2 RNAi Agents in hATXN2-IRES-gLuc-Expressing Mice

[0804] Female 6-8 week old C₅₇BL/6 mice were injected intravenously with AAV harboring a Homo sapiens ATHX2 (hATXN2)-IRES (internal ribosome entry site)—Gaussia luciferase (gLuc) construct. Viral titer was 1.2 E+13 VP/mL (viral particles per mL), and total dose was 2 E+11 VP/mouse. 5 mg/kg siRNAs were injected subcutaneously (SC, at DO) two weeks after injection of virus, and serum was sampled at DO and at day 14 (D14), while mice were sacrificed and livers harvested at D14. gLuc assessment and qPCR were performed upon D14 liver samples. A Hs00268077_m1 ATXN2 Taqman probe was used for qPCR evaluation, while a Mm99999915_g1 control probe was also employed.

### ATXN2 Endogenous Mouse Pharamacodynamics (PD) Study

[0805] Mouse ATXN2 (mATXN2) knockdown potency of various siRNA duplexes was evaluated. Animals (C₅₇BL/6 females, 20-25 g weight) were dosed with a single SC injection on day 0. On day 14, animals were euthanized. Liver was collected (flash frozen in 15 ml grinding vials with 2 metal balls) for mRNA analysis via RT-qPCR for relative expression of mATXN2 in treated groups (1-12) vs a PBS control group (13). Three mice were dosed per group.

### Example 2: Knockdown of ATXN2 in Human BE(2)-C Cells, Mouse nuro2A Cells and ATXN2 Expressed Via Dual-Luciferase psiCHECK2 Vector in Cos-7 Cells

[0806] A series of ATXN2 iRNA agents—for which modified (based on key in Table 1) and unmodified sequences are listed in Tables 2, 3, 5, and 6—were used to screen for transcript suppression in neuronal cell lines, with Cos-7 cells (a green monkey fibroblast cell line) employing a dual-luciferase reporter system. Human neuronal cell line BE(2)-C, mouse neuronal cell line Neuro-2A and psiCHECK2 ATXN2-expressing Cos-7 cells were transfected with siRNA at 10 nM and 0.1 nM. The observed levels of ATXN2 transcript or luciferase reporter appear in Tables 4 and 7.

### Example 3: Design, Construction, and Preparation of ATXN2 Adeno-Associated Virus (AAV)

[0807] Adeno-associated virus (AAV) encoding human ATXN2 was generated through the design of a cis vector that carried parts of the human transcript NM_002973.3 and the transcript of the Gaussia princeps luciferase (EU372000.1). Human transcript NM_002973.3 was used for generation ATXN2 AAV. Co-transfection of packaging cells with the cis vector, Rep/Cap vector and Ad helper vector led to production of AAV viral particles, followed by gradient purification, desalting and viral titer quantification.

### Example 4: In Vivo Evaluation of ATXN2 RNAi Agents

[0808] Selected ATXN2-targeting RNAi agents were evaluated for in vivo efficacy and lead identification, by screening for human ATXN2 knockdown in AAV mice. The selected RNAi agents for such studies included AD-365144, AD-366366, AD-367794, AD-367809, AD-367815, AD-367816, AD-367818, AD-367850, AD-367853, AD-367878, AD-367917, AD-367967, and AD-387779, having chemically modified sequences and L96 GalNAc ligands (Table 2) as indicated in Table 1 below, and corresponding unmodified sequences as shown in Table 3.

[0809] In such studies, an AAV vector harboring Homo sapiens ATXN2 was intravenously injected to 6-8 week old C₅₇BL/6 female mice, and at 14 days post-AAV administration, a selected RNAi agent or a control agent were subcutaneously injected at 3 mg/kg to mice (n=3 per group), with mice sacrificed and livers assessed for ATXN2 mRNA levels at 14 days post-subcutaneous injection of RNAi agent or control. Mice injected with ATXN2 iRNA AD-365144 and AD-367816 showed the highest decrease of human ATXN2 in the liver. Mice injected with AD-365144, AD-367815, AD-367816, AD-367809, and AD-367818 showed as strong decrease of Gaussia luciferase (gLuc) reporter protein in the serum. Results are shown in Table 8.

### Example 5: Further In Vivo Evaluation of ATXN2 RNAi Agents in hATXN2-IRES-gLuc-Expressing Mice

[0810] ATXN2-targeting siRNAs were further evaluated, specifically for in vivo knockdown of Gaussia luciferase (gLuc) in mice AAV-transduced with a human ATXN2-IRES-gLuc construct. gLuc in such mice is a secreted luciferase, separated by IRES from hATXN2 on the AAV construct, and gLuc therefore serves a quantitative reporter of human ATXN2 in such mice (n=3 per group). Between two and four duplexes (AD-1044729.1 and AD-1044730.1, and possibly also AD-1040560.1 and AD-1041737.1), in addition to AD-365144.1, were thereby identified as knocking down gLuc (and therefore human ATXN2) by at least 40% in livers of AAV-transduced mice at day 14 (D14) after subcutaneous siRNA injection (at 5 mg/kg) (FIG. 2A). Quantitative PCR (qPCR) was also performed upon liver samples harvested from the same mice, which assessed aggregate ATXN2 levels (both endogenous mouse ATXN2 and transfected human ATXN2) in such siRNA-treated mice, as compared to PBS-treated, naïve and AD-64228.41-treated controls (FIG. 2B). As shown in Table 12, in many cases, gLuc (proxy for hATXN2) and ATXN2 qPCR (which assesses endogenous ATXN2) results diverged.

### Example 6: In Vivo Evaluation of Endogenous Mouse ATXN2 Pharamacodynamics (PD)

[0811] Mouse ATXN2 (mATXN2) knockdown potency of various siRNA duplexes was evaluated following 1 mg/kg SC injections of siRNAs (FIGS. 3A and 3B). RT-qPCR evaluation of endogenous mouse mATXN2 revealed significant variability in certain treated groups (FIG. 3A), and removal of two “up-regulated groups” allowed for improved discernment of groups in which ATXN2-targeting siRNAs were consistently effective ATXN2 inhibitory agents (FIG. 3B). 5 mg/kg and/or 10 mg/kg dosing is expected to increase the extent of mATXN2 knockdown observed.

### Example 7: Knockdown of ATXN2 Expression in Mice That Express Human ATXN2 With a Single Dose ATXN2 siRNA Treatment

[0812] A series of iRNA agents targeting human ATXN2 are selected and tested for the ability to knockdown expression of ATXN2 mRNA in 6- to 8-week-old human ATXN2 transgenic of knock-in (KI) female mice. Examples of ATXN2 transgenic mouse strains include Q58 (Huynh et al. Nat Genet 26: 44-50), Q75 (Aguiar et al. Neurosci Lett 392: 202-206), Q127 (Hansen et al. Hum Mol Genet 22: 271-283), and BAC-Q72 (Dansithong et al. PLoS Genet 11: e1005182). Mouse strains that carry human ATXN2 knock-in (KI) into the mouse ATXN2 locus include Q42KI (Damrath et al. PLoS Genet 8: e1002920) and Q100KI. A single dose of iRNA agents selected from Tables 9 and 10 at 25 μg, 50 μg, 100 μg, or 200 μg, or artificial CSF control, are administered intracerebroventricularly (n=3, n=4 or n=5 per group). Two to four weeks after, the mice are sacrificed to assess knockdown of ATXN2 mRNA in the brain. Mice that are injected with ATXN2 iRNA show significant decrease in human ATXN2 transcript in the brain and spinal cord.

### Example 8: Resolution of SCA2 Phenotypes in Human Mutant ATXN2-Expressing Mice After a Single Injection of siRNA

[0813] One to five iRNAs are selected from Tables 9 and 10 and injected intracerebroventricularly into early symptomatic human mutant ATXN2-expressing mice at approximately 8 weeks of age. The pathological features and SCA2 behavior are evaluated at intervals between 16 and 32 weeks of age. Both brain pathology and behavior are significantly ameliorated at one or more timepoints between 16 and 32 weeks of age.

[0814] The “mRNA” sequences of the Informal Sequence Listing and certain of the “mRNA target” sequences listed herein (see at least Tables 9 and 10 below) may be noted as reciting thymine (T) residues rather than uracil (U) residues. As is apparent to one of ordinary skill in the art, such sequences reciting “T” residues rather than “U” residues can be derived from NCBI accession records that list, as “mRNA” sequences, the DNA sequences (not RNA sequences) that directly correspond to mRNA sequences. Such DNA sequences that directly correspond to mRNA sequences technically constitute the DNA sequence that is the complement of the cDNA (complementary DNA) sequence for an indicated mRNA. Thus, while the mRNA target sequence does, in fact, actually include uracil (U) rather than thymine (T), the NCBI record-derived “mRNA” sequence includes thymine (T) residues rather than uracil (U) residues.

TABLE 1
Abbreviations of nucleotide monomers used in
nucleic acid sequence representation.
It will be understood that these monomers, when present in an
oligonucleotide, are mutually linked by 5′-3′-phosphodiester bonds.

| Abbreviation | Nucleotide(s) |
|---|---|
| A | Adenosine-3′-phosphate |
| Ab | beta-L-adenosine-3′-phosphate |
| Abs | beta-L-adenosine-3′-phosphorothioate |
| Af | 2′-fluoroadenosine-3′-phosphate |
| Afs | 2′-fluoroadenosine-3′-phosphorothioate |
| As | adenosine-3′-phosphorothioate |
| C | cytidine-3′-phosphate |
| Cb | beta-L-cytidine-3′-phosphate |
| Cbs | beta-L-cytidine-3′-phosphorothioate |
| Cf | 2′-fluorocytidine-3′-phosphate |
| Cfs | 2′-fluorocytidine-3′-phosphorothioate |
| Cs | cytidine-3′-phosphorothioate |
| G | guanosine-3′-phosphate |
| Gb | beta-L-guanosine-3′-phosphate |
| Gbs | beta-L-guanosine-3′-phosphorothioate |
| Gf | 2′-fluoroguanosine-3′-phosphate |
| Gfs | 2′-fluoroguanosine-3′-phosphorothioate |
| Gs | guanosine-3′-phosphorothioate |
| T | 5′-methyluridine-3′-phosphate |
| Tf | 2′-fluoro-5-methyluridine-3′-phosphate |
| Tfs | 2′-fluoro-5-methyluridine-3′-phosphorothioate |
| Ts | 5-methyluridine-3′-phosphorothioate |
| U | Uridine-3′-phosphate |
| Uf | 2′-fluorouridine-3′-phosphate |
| Ufs | 2′-fluorouridine-3′-phosphorothioate |
| Us | uridine-3′-phosphorothioate |
| N | any nucleotide, modified or unmodified |
| a | 2′-O-methyladenosine-3′-phosphate |
| as | 2′-O-methyladenosine-3′-phosphorothioate |
| c | 2′-O-methylcytidine-3′-phosphate |
| cs | 2′-O-methylcytidine-3′-phosphorothioate |
| g | 2′-O-methylguanosine-3′-phosphate |
| gs | 2′-O-methylguanosine-3′-phosphorothioate |
| t | 2′-O-methyl-5-methyluridine-3′-phosphate |
| ts | 2′-O-methyl-5-methyluridine-3′-phosphorothioate |
| u | 2′-O-methyluridine-3′-phosphate |
| us | 2′-O-methyluridine-3′-phosphorothioate |
| s | phosphorothioate linkage |
| L96 | N-[tris(GalNAc-alkyl)-amidodecanoyl)]-4- |
| | hydroxyprolinol Hyp-(GalNAc-alkyl)3 (Hyp- |
| | (GalNAc-alkyl)3) |
| Y34 | 2-hydroxymethyl-tetrahydrofurane-4-methoxy- |
| | 3-phosphate (abasic 2′-OMe furanose) |
| Y44 | inverted abasic DNA (2-hydroxymethyl- |
| | tetrahydrofurane-5-phosphate) |
| (Agn) | Adenosine-glycol nucleic acid (GNA) |
| (Cgn) | Cytidine-glycol nucleic acid (GNA) |
| (Ggn) | Guanosine-glycol nucleic acid (GNA) |
| (Tgn) | Thymidine-glycol nucleic acid (GNA) S-Isomer |
| P | Phosphate |
| VP | Vinyl-phosphate |
| (Aam) | 2′-O-(N-methylacetamide)adenosine-3′-phosphate |
| (Aams) | 2′-O-(N-methylacetamide)adenosine-3′-phosphorothioate |
| (Gam) | 2′-O-(N-methylacetamide)guanosine-3′-phosphate |
| (Gams) | 2′-O-(N-methylacetamide)guanosine-3′-phosphorothioate |
| (Tam) | 2′-O-(N-methylacetamide)thymidine-3′-phosphate |
| (Tams) | 2′-O-(N-methylacetamide)thymidine-3′-phosphorothioate |
| dA | 2′-deoxyadenosine-3′-phosphate |
| dAs | 2′-deoxyadenosine-3′-phosphorothioate |
| dC | 2′-deoxycytidine-3′-phosphate |
| dCs | 2′-deoxycytidine-3′-phosphorothioate |
| dG | 2′-deoxyguanosine-3′-phosphate |
| dGs | 2′-deoxyguanosine-3′-phosphorothioate |
| dT | 2′-deoxythymidine-3′-phosphate |
| dTs | 2′-deoxythymidine-3′-phosphorothioate |
| dU | 2′-deoxyuridine |
| dUs | 2′-deoxyuridine-3′-phosphorothioate |
| (Aeo) | 2′-O-methoxyethyladenosine-3′-phosphate |
| (Aeos) | 2′-O-methoxyethyladenosine-3′-phosphorothioate |
| (Geo) | 2′-O-methoxyethylguanosine-3′-phosphate |
| (Geos) | 2′-O-methoxyethylguanosine-3′-phosphorothioate |
| (Teo) | 2′-O-methoxyethyl-5-methyluridine-3′-phosphate |
| (Teos) | 2′-O-methoxyethyl-5-methyluridine-3′-phosphorothioate |
| (m5Ceo) | 2′-O-methoxyethyl-5-methylcytidine-3′-phosphate |
| (m5Ceos) | 2′-O-methoxyethyl-5-methylcytidine-3′-phosphorothioate |
| (A3m) | 3′-O-methyladenosine-2′-phosphate |
| (A3mx) | 3′-O-methyl-xylofuranosyladenosine-2′-phosphate |
| (G3m) | 3′-O-methylguanosine-2′-phosphate |
| (G3mx) | 3′-O-methyl-xylofuranosylguanosine-2′-phosphate |
| (C3m) | 3′-O-methylcytidine-2′-phosphate |
| (C3mx) | 3′-O-methyl-xylofuranosylcytidine-2′-phosphate |
| (U3m) | 3′-O-methyluridine-2′-phosphate |
| U3mx) | 3′-O-methyl-xylofuranosyluridine-2′-phosphate |
| (m5Cam) | 2′-O-(N-methylacetamide)-5-methylcytidine-3′-phosphate |
| (m5Cams) | 2′-O-(N-methylacetamide)-5-methylcytidine- |
| | 3′-phosphorothioate |
| (Ahd) | 2′-O-hexadecyl-adenosine-3′-phosphate |
| (Ahds) | 2′-O-hexadecyl-adenosine-3′-phosphorothioate |
| (Ghd) | 2′-O-hexadecyl-guanosine-3′-phosphate |
| (Ghds) | 2′-O-hexadecyl-guanosine-3′-phosphorothioate |
| (Chd) | 2′-O-hexadecyl-cytidine-3′-phosphate |
| (Chds) | 2′-O-hexadecyl-cytidine-3′-phosphorothioate |
| (Uhd) | 2′-O-hexadecyl-uridine-3′-phosphate |
| (Uhds) | 2′-O-hexadecyl-uridine-3′-phosphorothioate |
| (pshe) | Hydroxyethylphosphorothioate |

TABLE 2
Modified Sense and Antisense Strand Sequences of Human and Rodent ATXN2 siRNAs.

| | | | | Antisense | | | | |
|---|---|---|---|---|---|---|---|---|
| Duplex Name | Sebse Oligo Name | Oligo Seq | SEQ | Oligo Name | Oligo Seq | SEQ | mRNA target sequence | SEQ |
| AD-364136.1 | A-706003.1 | uscscgacUfuCdCfGfguaaagaguuL96 | 13 | A-706004.1 | asAfscucu(Tgn)uaccggAfaGfucggasgcg | 278 | CCUCCGACUUCCGGUAAAGAGUC | 543 |
| AD-364137.1 | A-706005.1 | cscsgacuUfcCfGfGfuaaagagucuL96 | 14 | A-706006.1 | asGfsacuc(Tgn)uuaccgGfaAfgucggsasg | 279 | CUCCGACUUCCGGUAAAGAGUCC | 544 |
| AD-364138.1 | A-706007.1 | csgsacuuCfcGfGfUfaaagaguccuL96 | 15 | A-706008.1 | asGfsgacu(Cgn)uuuaccGfgAfagucgsgsa | 280 | UCCGACUUCCGGUAAAGAGUCCC | 545 |
| AD-365055.1 | A-707841.1 | asasugugAfaGfUfAfcaagugaaaaL96 | 16 | A-707842.1 | usUfsuuca(Cgn)uuguacUfuCfacauususg | 281 | CAAAUGUGAAGUACAAGUGAAAA | 546 |
| AD-365056.1 | A-707843.1 | asusgugaAfgUfAfCfaagugaaaaaL96 | 17 | A-707844.1 | usUfsuuuc(Agn)cuuguaCfuUfcacaususu | 282 | AAAUGUGAAGUACAAGUGAAAAA | 547 |
| AD-365144.1 | A-708019.1 | csasugagAfaAfAfGfuacagaaucuL96 | 18 | A-708020.1 | asGfsauuc(Tgn)guacuuUfuCfucaugsusg | 283 | CACAUGAGAAAAGUACAGAAUCC | 548 |
| AD-365747.1 | A-709225.1 | csascuucUfcAfCfAfcuucagauuuL96 | 19 | A-709226.1 | asAfsaucu(Ggn)aaguguGfaGfaagugsgsa | 284 | UCCACUUCUCACACUUCAGAUUU | 549 |
| AD-365748.1 | A-709227.1 | ascsuucuCfaCfAfCfuucagauuucL96 | 20 | A-709228.1 | gsAfsaauc(Tgn)gaagugUfgAfgaagusgsg | 285 | CCACUUCUCACACUUCAGAUUUC | 550 |
| AD-365749.1 | A-709229.1 | csusucucAfcAfCfUfucagauuucaL96 | 21 | A-709230.1 | usGfsaaau(Cgn)ugaaguGfuGfagaagsusg | 286 | CACUUCUCACACUUCAGAUUUCA | 551 |
| AD-365750.1 | A-709231.1 | ususcucaCfaCfUfUfcagauuucaaL96 | 22 | A-709232.1 | usUfsgaaa(Tgn)cugaagUfgUfgagaasgsu | 287 | ACUUCUCACACUUCAGAUUUCAA | 552 |
| AD-365751.1 | A-709233.1 | uscsucacAfcUfUfCfagauuucaauL96 | 23 | A-709234.1 | asUfsugaa(Agn)ucugaaGfuGfugagasasg | 288 | CUUCUCACACUUCAGAUUUCAAC | 553 |
| AD-365752.1 | A-709235.1 | csuscacaCfuUfCfAfgauuucaacuL96 | 24 | A-709236.1 | asGfsuuga(Agn)aucugaAfgUfgugagsasa | 289 | UUCUCACACUUCAGAUUUCAACC | 554 |
| AD-365753.1 | A-709237.1 | uscsacacUfuCfAfGfauuucaaccuL96 | 25 | A-709238.1 | asGfsguug(Agn)aaucugAfaGfugugasgsa | 290 | UCUCACACUUCAGAUUUCAACCC | 555 |
| AD-365754.1 | A-709239.1 | csascacuUfcAfGfAfuuucaacccuL96 | 26 | A-709240.1 | asGfsgguu(Ggn)aaaucuGfaAfgugugsasg | 291 | CUCACACUUCAGAUUUCAACCCG | 556 |
| AD-365757.1 | A-709245.1 | ascsuucaGfaUfUfUfcaacccgaauL96 | 27 | A-709246.1 | asUfsucgg(Ggn)uugaaaUfcUfgaagusgsu | 292 | ACACUUCAGAUUUCAACCCGAAU | 557 |
| AD-365784.1 | A-709299.1 | uscsagacCfaAfAfGfaguaguuaauL96 | 28 | A-709300.1 | asUfsuaac(Tgn)acucuuUfgGfucugasasc | 293 | GUUCAGACCAAAGAGUAGUUAAU | 558 |
| AD-365785.1 | A-709301.1 | csasgaccAfaAfGfAfguaguuaauuL96 | 29 | A-709302.1 | asAfsuuaa(Cgn)uacucuUfuGfgucugsasa | 294 | UUCAGACCAAAGAGUAGUUAAUG | 559 |
| AD-365915.1 | A-709561.1 | csuscuacUfaUfGfCfcuaaacgcauL96 | 30 | A-709562.1 | asUfsgcgu(Tgn)uaggcaUfaGfuagagsasc | 295 | GUCUCUACUAUGCCUAAACGCAU | 560 |
| AD-365916.1 | A-709563.1 | uscsuacuAfuGfCfCfuaaacgcauuL96 | 31 | A-709564.1 | asAfsugcg(Tgn)uuaggcAfuAfguagasgsa | 296 | UCUCUACUAUGCCUAAACGCAUG | 561 |
| AD-365918.1 | A-709567.1 | usascuauGfcCfUfAfaacgcauguuL96 | 32 | A-709568.1 | asAfscaug(Cgn)guuuagGfcAfuaguasgsa | 297 | UCUACUAUGCCUAAACGCAUGUC | 562 |
| AD-366362.1 | A-710455.1 | csusucugAfaUfCfUfauggaucaauL96 | 33 | A-710456.1 | asUfsugau(Cgn)cauagaUfuCfagaagsusa | 298 | UACUUCUGAAUCUAUGGAUCAAC | 563 |
| AD-366363.1 | A-710457.1 | ususcugaAfuCfUfAfuggaucaacuL96 | 34 | A-710458.1 | asGfsuuga(Tgn)ccauagAfuUfcagaasgsu | 299 | ACUUCUGAAUCUAUGGAUCAACU | 564 |
| AD-366364.1 | A-710459.1 | uscsugaaUfcUfAfUfggaucaacuaL96 | 35 | A-710460.1 | usAfsguug(Agn)uccauaGfaUfucagasasg | 300 | CUUCUGAAUCUAUGGAUCAACUA | 565 |
| AD-366365.1 | A-710461.1 | csusgaauCfuAfUfGfgaucaacuauL96 | 36 | A-710462.1 | asUfsaguu(Ggn)auccauAfgAfuucagsasa | 301 | UUCUGAAUCUAUGGAUCAACUAC | 566 |
| AD-366366.1 | A-710463.1 | usgsaaucUfaUfGfGfaucaacuacuL96 | 37 | A-710464.1 | asGfsuagu(Tgn)gauccaUfaGfauucasgsa | 302 | UCUGAAUCUAUGGAUCAACUACU | 567 |
| AD-366367.1 | A-710465.1 | gsasaucuAfuGfGfAfucaacuacuaL96 | 38 | A-710466.1 | usAfsguag(Tgn)ugauccAfuAfgauucsasg | 303 | CUGAAUCUAUGGAUCAACUACUA | 568 |
| AD-366368.1 | A-710467.1 | asasucuaUfgGfAfUfcaacuacuaaL96 | 39 | A-710468.1 | usUfsagua(Ggn)uugaucCfaUfagauuscsa | 304 | UGAAUCUAUGGAUCAACUACUAA | 569 |
| AD-366369.1 | A-710469.1 | asuscuauGfgAfUfCfaacuacuaaaL96 | 40 | A-710470.1 | usUfsuagu(Agn)guugauCfcAfuagaususc | 305 | GAAUCUAUGGAUCAACUACUAAA | 570 |
| AD-366772.1 | A-711275.1 | usasuaccCfaAfUfAfccuaugacguL96 | 41 | A-711276.1 | asCfsguca(Tgn)agguauUfgGfguauasasa | 306 | UUUAUACCCAAUACCUAUGACGC | 571 |
| AD-366815.1 | A-711361.1 | gsascauaUfaGfAfGfcaguaccaaaL96 | 42 | A-711362.1 | usUfsuggu(Agn)cugcucUfaUfaugucsusu | 307 | AAGACAUAUAGAGCAGUACCAAA | 572 |
| AD-366818.1 | A-711367.1 | asusauagAfgCfAfGfuaccaaauauL96 | 43 | A-711368.1 | asUfsauuu(Ggn)guacugCfuCfuauausgsu | 308 | ACAUAUAGAGCAGUACCAAAUAU | 573 |
| AD-366819.1 | A-711369.1 | usasuagaGfcAfGfUfaccaaauauuL96 | 44 | A-711370.1 | asAfsuauu(Tgn)gguacuGfcUfcuauasusg | 309 | CAUAUAGAGCAGUACCAAAUAUG | 574 |
| AD-366820.1 | A-711371.1 | asusagagCfaGfUfAfccaaauauguL96 | 45 | A-711372.1 | asCfsauau(Tgn)ugguacUfgCfucuausasu | 310 | AUAUAGAGCAGUACCAAAUAUGC | 575 |
| AD-366822.1 | A-711375.1 | asgsagcaGfuAfCfCfaaauaugccuL96 | 46 | A-711376.1 | asGfsgcau(Agn)uuugguAfcUfgcucusasu | 311 | AUAGAGCAGUACCAAAUAUGCCC | 576 |
| AD-367069.1 | A-711869.1 | usgsucccAfaAfUfUfaccauacaauL96 | 47 | A-711870.1 | asUfsugua(Tgn)gguaauUfuGfggacasusg | 312 | CAUGUCCCAAAUUACCAUACAAC | 577 |
| AD-367071.1 | A-711873.1 | uscsccaaAfuUfAfCfcauacaacaaL96 | 48 | A-711874.1 | usUfsguug(Tgn)augguaAfuUfugggascsa | 313 | UGUCCCAAAUUACCAUACAACAA | 578 |
| AD-367098.1 | A-711927.1 | asasgcccUfuCfUfUfucuacuuuguL96 | 49 | A-711928.1 | asCfsaaag(Tgn)agaaagAfaGfggcuusgsu | 314 | ACAAGCCCUUCUUUCUACUUUGC | 579 |
| AD-367101.1 | A-711933.1 | cscscuucUfuUfCfUfacuuugccauL96 | 50 | A-711934.1 | asUfsggca(Agn)aguagaAfaGfaagggscsu | 315 | AGCCCUUCUUUCUACUUUGCCAU | 580 |
| AD-367102.1 | A-711935.1 | cscsuucuUfuCfUfAfcuuugccauuL96 | 51 | A-711936.1 | asAfsuggc(Agn)aaguagAfaAfgaaggsgsc | 316 | GCCCUUCUUUCUACUUUGCCAUU | 581 |
| AD-367103.1 | A-711937.1 | csusucuuUfcUfAfCfuuugccauuuL96 | 52 | A-711938.1 | asAfsaugg(Cgn)aaaguaGfaAfagaagsgsg | 317 | CCCUUCUUUCUACUUUGCCAUUU | 582 |
| AD-367104.1 | A-711939.1 | ususcuuuCfuAfCfUfuugccauuucL96 | 53 | A-711940.1 | gsAfsaaug(Ggn)caaaguAfgAfaagaasgsg | 318 | CCUUCUUUCUACUUUGCCAUUUC | 583 |
| AD-367105.1 | A-711941.1 | uscsuuucUfaCfUfUfugccauuucuL96 | 54 | A-711942.1 | asGfsaaau(Ggn)gcaaagUfaGfaaagasasg | 319 | CUUCUUUCUACUUUGCCAUUUCC | 584 |
| AD-367106.1 | A-711943.1 | csusuucuAfcUfUfUfgccauuuccaL96 | 55 | A-711944.1 | usGfsgaaa(Tgn)ggcaaaGfuAfgaaagsasa | 320 | UUCUUUCUACUUUGCCAUUUCCA | 585 |
| AD-367107.1 | A-711945.1 | ususucuaCfuUfUfGfccauuuccauL96 | 56 | A-711946.1 | asUfsggaa(Agn)uggcaaAfgUfagaaasgsa | 321 | UCUUUCUACUUUGCCAUUUCCAC | 586 |
| AD-367108.1 | A-711947.1 | ususcuacUfuUfGfCfcauuuccacuL96 | 57 | A-711948.1 | asGfsugga(Agn)auggcaAfaGfuagaasasg | 322 | CUUUCUACUUUGCCAUUUCCACG | 587 |
| AD-367438.1 | A-712607.1 | csasuguaCfaGfUfCfaggaaugguuL96 | 58 | A-712608.1 | asAfsccau(Tgn)ccugacUfgUfacaugsasg | 323 | CUCAUGUACAGUCAGGAAUGGUU | 588 |
| AD-367439.1 | A-712609.1 | asusguacAfgUfCfAfggaaugguuuL96 | 59 | A-712610.1 | asAfsacca(Tgn)uccugaCfuGfuacausgsa | 324 | UCAUGUACAGUCAGGAAUGGUUC | 589 |
| AD-367440.1 | A-712611.1 | usgsuacaGfuCfAfGfgaaugguucuL96 | 60 | A-712612.1 | asGfsaacc(Agn)uuccugAfcUfguacasusg | 325 | CAUGUACAGUCAGGAAUGGUUCC | 590 |
| AD-367448.1 | A-712627.1 | csasggaaUfgGfUfUfccuucucauuL96 | 61 | A-712628.1 | asAfsugag(Agn)aggaacCfaUfuccugsasc | 326 | GUCAGGAAUGGUUCCUUCUCAUC | 591 |
| AD-367451.1 | A-712633.1 | gsasauggUfuCfCfUfucucauccaaL96 | 62 | A-712634.1 | usUfsggau(Ggn)agaaggAfaCfcauucscsu | 327 | AGGAAUGGUUCCUUCUCAUCCAA | 592 |
| AD-367453.1 | A-712637.1 | asusgguuCfcUfUfCfucauccaacuL96 | 63 | A-712638.1 | asGfsuugg(Agn)ugagaaGfgAfaccaususc | 328 | GAAUGGUUCCUUCUCAUCCAACU | 593 |
| AD-367454.1 | A-712639.1 | usgsguucCfuUfCfUfcauccaacuuL96 | 64 | A-712640.1 | asAfsguug(Ggn)augagaAfgGfaaccasusu | 329 | AAUGGUUCCUUCUCAUCCAACUG | 594 |
| AD-367456.1 | A-712643.1 | gsusuccuUfcUfCfAfuccaacugcuL96 | 65 | A-712644.1 | asGfscagu(Tgn)ggaugaGfaAfggaacscsa | 330 | UGGUUCCUUCUCAUCCAACUGCC | 595 |
| AD-367477.1 | A-712685.1 | csasugcgCfcAfAfUfgaugcuaauuL96 | 66 | A-712686.1 | asAfsuuag(Cgn)aucauuGfgCfgcaugsgsg | 331 | CCCAUGCGCCAAUGAUGCUAAUG | 596 |
| AD-367480.1 | A-712691.1 | gscsgccaAfuGfAfUfgcuaaugacuL96 | 67 | A-712692.1 | asGfsucau(Tgn)agcaucAfuUfggcgcsasu | 332 | AUGCGCCAAUGAUGCUAAUGACG | 597 |
| AD-367482.1 | A-712695.1 | gscscaauGfaUfGfCfuaaugacgauL96 | 68 | A-712696.1 | asUfscguc(Agn)uuagcaUfcAfuuggcsgsc | 333 | GCGCCAAUGAUGCUAAUGACGAC | 598 |
| AD-367483.1 | A-712697.1 | cscsaaugAfuGfCfUfaaugacgacaL96 | 69 | A-712698.1 | usGfsucgu(Cgn)auuagcAfuCfauuggscsg | 334 | CGCCAAUGAUGCUAAUGACGACA | 599 |
| AD-367486.1 | A-712703.1 | asusgaugCfuAfAfUfgacgacacauL96 | 70 | A-712704.1 | asUfsgugu(Cgn)gucauuAfgCfaucaususg | 335 | CAAUGAUGCUAAUGACGACACAG | 600 |
| AD-367487.1 | A-712705.1 | usgsaugcUfaAfUfGfacgacacaguL96 | 71 | A-712706.1 | asCfsugug(Tgn)cgucauUfaGfcaucasusu | 336 | AAUGAUGCUAAUGACGACACAGC | 601 |
| AD-367513.1 | A-712757.1 | csgscucaAfaGfUfGfcacuacagcuL96 | 72 | A-712758.1 | asGfscugu(Agn)gugcacUfuUfgagcgsasg | 337 | CUCGCUCAAAGUGCACUACAGCC | 602 |
| AD-367530.1 | A-712791.1 | asgscccaUfuCfCfAfgucucgacaaL96 | 73 | A-712792.1 | usUfsgucg(Agn)gacuggAfaUfgggcusgsu | 338 | ACAGCCCAUUCCAGUCUCGACAA | 603 |
| AD-367532.1 | A-712795.1 | cscscauuCfcAfGfUfcucgacaacaL96 | 74 | A-712796.1 | usGfsuugu(Cgn)gagacuGfgAfaugggscsu | 339 | AGCCCAUUCCAGUCUCGACAACA | 604 |
| AD-367571.1 | A-712873.1 | csasccacCfaAfCfAfgcaguuguaaL96 | 75 | A-712874.1 | usUfsacaa(Cgn)ugcuguUfgGfuggugsgsg | 340 | CCCACCACCAACAGCAGUUGUAA | 605 |
| AD-367572.1 | A-712875.1 | ascscaccAfaCfAfGfcaguuguaauL96 | 76 | A-712876.1 | asUfsuaca(Agn)cugcugUfuGfguggusgsg | 341 | CCACCACCAACAGCAGUUGUAAG | 606 |
| AD-367573.1 | A-712877.1 | cscsaccaAfcAfGfCfaguuguaaguL96 | 77 | A-712878.1 | asCfsuuac(Agn)acugcuGfuUfgguggsusg | 342 | CACCACCAACAGCAGUUGUAAGG | 607 |
| AD-367575.1 | A-712881.1 | ascscaacAfgCfAfGfuuguaaggcuL96 | 78 | A-712882.1 | asGfsccuu(Agn)caacugCfuGfuuggusgsg | 343 | CCACCAACAGCAGUUGUAAGGCU | 608 |
| AD-367577.1 | A-712885.1 | csasacagCfaGfUfUfguaaggcuguL96 | 79 | A-712886.1 | asCfsagcc(Tgn)uacaacUfgCfuguugsgsu | 344 | ACCAACAGCAGUUGUAAGGCUGC | 609 |
| AD-367630.1 | A-712991.1 | csusucuaCfuGfCfUfucuaccaacuL96 | 80 | A-712992.1 | asGfsuugg(Tgn)agaagcAfgUfagaagsgsg | 345 | CCCUUCUACUGCUUCUACCAACU | 610 |
| AD-367632.1 | A-712995.1 | uscsuacuGfcUfUfCfuaccaacuguL96 | 81 | A-712996.1 | asCfsaguu(Ggn)guagaaGfcAfguagasasg | 346 | CUUCUACUGCUUCUACCAACUGG | 611 |
| AD-367633.1 | A-712997.1 | csusacugCfuUfCfUfaccaacuggaL96 | 82 | A-712998.1 | usCfscagu(Tgn)gguagaAfgCfaguagsasa | 347 | UUCUACUGCUUCUACCAACUGGA | 612 |
| AD-367636.1 | A-713003.1 | csusgcuuCfuAfCfCfaacuggaaguL96 | 83 | A-713004.1 | asCfsuucc(Agn)guugguAfgAfagcagsusa | 348 | UACUGCUUCUACCAACUGGAAGC | 613 |
| AD-367646.1 | A-713023.1 | csasacugGfaAfGfCfacagaaaacuL96 | 84 | A-713024.1 | asGfsuuuu(Cgn)ugugcuUfcCfaguugsgsu | 349 | ACCAACUGGAAGCACAGAAAACU | 614 |
| AD-367685.1 | A-713101.1 | ususgauuUfcUfUfGfuaacauccaaL96 | 85 | A-713102.1 | usUfsggau(Ggn)uuacaaGfaAfaucaascsa | 350 | UGUUGAUUUCUUGUAACAUCCAA | 615 |
| AD-367688.1 | A-713107.1 | asusuucuUfgUfAfAfcauccaauauL96 | 86 | A-713108.1 | asUfsauug(Ggn)auguuaCfaAfgaaauscsa | 351 | UGAUUUCUUGUAACAUCCAAUAG | 616 |
| AD-367690.1 | A-713111.1 | ususcuugUfaAfCfAfuccaauaggaL96 | 87 | A-713112.1 | usCfscuau(Tgn)ggauguUfaCfaagaasasu | 352 | AUUUCUUGUAACAUCCAAUAGGA | 617 |
| AD-367691.1 | A-713113.1 | uscsuuguAfaCfAfUfccaauaggaaL96 | 88 | A-713114.1 | usUfsccua(Tgn)uggaugUfuAfcaagasasa | 353 | UUUCUUGUAACAUCCAAUAGGAA | 618 |
| AD-367694.1 | A-713119.1 | usgsuaacAfuCfCfAfauaggaauguL96 | 89 | A-713120.1 | asCfsauuc(Cgn)uauuggAfuGfuuacasasg | 354 | CUUGUAACAUCCAAUAGGAAUGC | 619 |
| AD-367696.1 | A-713123.1 | usasacauCfcAfAfUfaggaaugcuaL96 | 90 | A-713124.1 | usAfsgcau(Tgn)ccuauuGfgAfuguuascsa | 355 | UGUAACAUCCAAUAGGAAUGCUA | 620 |
| AD-367697.1 | A-713125.1 | asascaucCfaAfUfAfggaaugcuaaL96 | 91 | A-713126.1 | usUfsagca(Tgn)uccuauUfgGfauguusasc | 356 | GUAACAUCCAAUAGGAAUGCUAA | 621 |
| AD-367698.1 | A-713127.1 | ascsauccAfaUfAfGfgaaugcuaauL96 | 92 | A-713128.1 | asUfsuagc(Agn)uuccuaUfuGfgaugususa | 357 | UAACAUCCAAUAGGAAUGCUAAC | 622 |
| AD-367699.1 | A-713129.1 | csasuccaAfuAfGfGfaaugcuaacaL96 | 93 | A-713130.1 | usGfsuuag(Cgn)auuccuAfuUfggaugsusu | 358 | AACAUCCAAUAGGAAUGCUAACA | 623 |
| AD-367704.1 | A-713139.1 | asasuaggAfaUfGfCfuaacaguucaL96 | 94 | A-713140.1 | usGfsaacu(Ggn)uuagcaUfuCfcuauusgsg | 359 | CCAAUAGGAAUGCUAACAGUUCA | 624 |
| AD-367705.1 | A-713141.1 | asusaggaAfuGfCfUfaacaguucauL96 | 95 | A-713142.1 | asUfsgaac(Tgn)guuagcAfuUfccuaususg | 360 | CAAUAGGAAUGCUAACAGUUCAC | 625 |
| AD-367706.1 | A-713143.1 | usasggaaUfgCfUfAfacaguucacuL96 | 96 | A-713144.1 | asGfsugaa(Cgn)uguuagCfaUfuccuasusu | 361 | AAUAGGAAUGCUAACAGUUCACU | 626 |
| AD-367707.1 | A-713145.1 | asgsgaauGfcUfAfAfcaguucacuuL96 | 97 | A-713146.1 | asAfsguga(Agn)cuguuaGfcAfuuccusasu | 362 | AUAGGAAUGCUAACAGUUCACUU | 627 |
| AD-367708.1 | A-713147.1 | gsgsaaugCfuAfAfCfaguucacuuuL96 | 98 | A-713148.1 | asAfsagug(Agn)acuguuAfgCfauuccsusa | 363 | UAGGAAUGCUAACAGUUCACUUG | 628 |
| AD-367709.1 | A-713149.1 | gsasaugcUfaAfCfAfguucacuuguL96 | 99 | A-713150.1 | asCfsaagu(Ggn)aacuguUfaGfcauucscsu | 364 | AGGAAUGCUAACAGUUCACUUGC | 629 |
| AD-367713.1 | A-713157.1 | gscsuaacAfgUfUfCfacuugcaguuL96 | 100 | A-713158.1 | asAfscugc(Agn)agugaaCfuGfuuagcsasu | 365 | AUGCUAACAGUUCACUUGCAGUG | 630 |
| AD-367718.1 | A-713167.1 | csasguucAfcUfUfGfcaguggaagaL96 | 101 | A-713168.1 | usCfsuucc(Agn)cugcaaGfuGfaacugsusu | 366 | AACAGUUCACUUGCAGUGGAAGA | 631 |
| AD-367745.1 | A-713221.1 | gsasccgaGfuAfGfAfggcauuuaguL96 | 102 | A-713222.1 | asCfsuaaa(Tgn)gccucuAfcUfcggucscsa | 367 | UGGACCGAGUAGAGGCAUUUAGG | 632 |
| AD-367746.1 | A-713223.1 | ascscgagUfaGfAfGfgcauuuaggaL96 | 103 | A-713224.1 | usCfscuaa(Agn)ugccucUfaCfucgguscsc | 368 | GGACCGAGUAGAGGCAUUUAGGA | 633 |
| AD-367755.1 | A-713241.1 | gsgscuauUfcCfAfUfaauuccauauL96 | 104 | A-713242.1 | asUfsaugg(Agn)auuaugGfaAfuagccscsc | 369 | GGGGCUAUUCCAUAAUUCCAUAU | 634 |
| AD-367792.1 | A-713315.1 | usgsccgaAfaCfUfGfgaaguuauuuL96 | 105 | A-713316.1 | asAfsauaa(Cgn)uuccagUfuUfcggcasasg | 370 | CUUGCCGAAACUGGAAGUUAUUU | 635 |
| AD-367794.1 | A-713319.1 | cscsgaaaCfuGfGfAfaguuauuuauL96 | 106 | A-713320.1 | asUfsaaau(Agn)acuuccAfgUfuucggscsa | 371 | UGCCGAAACUGGAAGUUAUUUAU | 636 |
| AD-367795.1 | A-713321.1 | csgsaaacUfgGfAfAfguuauuuauuL96 | 107 | A-713322.1 | asAfsuaaa(Tgn)aacuucCfaGfuuucgsgsc | 372 | GCCGAAACUGGAAGUUAUUUAUU | 637 |
| AD-367796.1 | A-713323.1 | gsasaacuGfgAfAfGfuuauuuauuuL96 | 108 | A-713324.1 | asAfsauaa(Agn)uaacuuCfcAfguuucsgsg | 373 | CCGAAACUGGAAGUUAUUUAUUU | 638 |
| AD-367797.1 | A-713325.1 | asasacugGfaAfGfUfuauuuauuuuL96 | 109 | A-713326.1 | asAfsaaua(Agn)auaacuUfcCfaguuuscsg | 374 | CGAAACUGGAAGUUAUUUAUUUU | 639 |
| AD-367801.1 | A-713333.1 | usasauaaCfcCfUfUfgaaagucauuL96 | 110 | A-713334.1 | asAfsugac(Tgn)uucaagGfgUfuauuasasa | 375 | UUUAAUAACCCUUGAAAGUCAUG | 640 |
| AD-367802.1 | A-713335.1 | asasuaacCfcUfUfGfaaagucaugaL96 | 111 | A-713336.1 | usCfsauga(Cgn)uuucaaGfgGfuuauusasa | 376 | UUAAUAACCCUUGAAAGUCAUGA | 641 |
| AD-367805.1 | A-713341.1 | asascccuUfgAfAfAfgucaugaacaL96 | 112 | A-713342.1 | usGfsuuca(Tgn)gacuuuCfaAfggguusasu | 377 | AUAACCCUUGAAAGUCAUGAACA | 642 |
| AD-367809.1 | A-713349.1 | csusugaaAfgUfCfAfugaacacauuL96 | 113 | A-713350.1 | asAfsugug(Tgn)ucaugaCfuUfucaagsgsg | 378 | CCCUUGAAAGUCAUGAACACAUC | 643 |
| AD-367815.1 | A-713361.1 | asgsucauGfaAfCfAfcaucagcuauL96 | 114 | A-713362.1 | asUfsagcu(Ggn)auguguUfcAfugacususu | 379 | AAAGUCAUGAACACAUCAGCUAG | 644 |
| AD-367816.1 | A-713363.1 | gsuscaugAfaCfAfCfaucagcuaguL96 | 115 | A-713364.1 | asCfsuagc(Tgn)gaugugUfuCfaugacsusu | 380 | AAGUCAUGAACACAUCAGCUAGC | 645 |
| AD-367817.1 | A-713365.1 | uscsaugaAfcAfCfAfucagcuagcaL96 | 116 | A-713366.1 | usGfscuag(Cgn)ugauguGfuUfcaugascsu | 381 | AGUCAUGAACACAUCAGCUAGCA | 646 |
| AD-367818.1 | A-713367.1 | csasugaaCfaCfAfUfcagcuagcaaL96 | 117 | A-713368.1 | usUfsgcua(Ggn)cugaugUfgUfucaugsasc | 382 | GUCAUGAACACAUCAGCUAGCAA | 647 |
| AD-367819.1 | A-713369.1 | asusgaacAfcAfUfCfagcuagcaaaL96 | 118 | A-713370.1 | usUfsugcu(Agn)gcugauGfuGfuucausgsa | 383 | UCAUGAACACAUCAGCUAGCAAA | 648 |
| AD-367819.2 | A-713369.1 | asusgaacAfcAfUfCfagcuagcaaaL96 | 119 | A-713370.1 | usUfsugcu(Agn)gcugauGfuGfuucausgsa | 384 | UCAUGAACACAUCAGCUAGCAAA | 649 |
| AD-367820.1 | A-713371.1 | usgsaacaCfaUfCfAfgcuagcaaaaL96 | 120 | A-713372.1 | usUfsuugc(Tgn)agcugaUfgUfguucasusg | 385 | CAUGAACACAUCAGCUAGCAAAA | 650 |
| AD-367821.1 | A-713373.1 | gsasacacAfuCfAfGfcuagcaaaauL96 | 121 | A-713374.1 | asUfsuuug(Cgn)uagcugAfuGfuguucsasu | 386 | AUGAACACAUCAGCUAGCAAAAG | 651 |
| AD-367822.1 | A-713375.1 | asascacaUfcAfGfCfuagcaaaagaL96 | 122 | A-713376.1 | usCfsuuuu(Ggn)cuagcuGfaUfguguuscsa | 387 | UGAACACAUCAGCUAGCAAAAGA | 652 |
| AD-367826.1 | A-713383.1 | csasucagCfuAfGfCfaaaagaaguaL96 | 123 | A-713384.1 | usAfscuuc(Tgn)uuugcuAfgCfugaugsusg | 388 | CACAUCAGCUAGCAAAAGAAGUA | 653 |
| AD-367832.1 | A-713395.1 | csusagcaAfaAfGfAfaguaacaagaL96 | 124 | A-713396.1 | usCfsuugu(Tgn)acuucuUfuUfgcuagscsu | 389 | AGCUAGCAAAAGAAGUAACAAGA | 654 |
| AD-367844.1 | A-713419.1 | gsusaacaAfgAfGfUfgauucuugcuL96 | 125 | A-713420.1 | asGfscaag(Agn)aucacuCfuUfguuacsusu | 390 | AAGUAACAAGAGUGAUUCUUGCU | 655 |
| AD-367845.1 | A-713421.1 | usasacaaGfaGfUfGfauucuugcuuL96 | 126 | A-713422.1 | asAfsgcaa(Ggn)aaucacUfcUfuguuascsu | 391 | AGUAACAAGAGUGAUUCUUGCUG | 656 |
| AD-367846.1 | A-713423.1 | asascaagAfgUfGfAfuucuugcuguL96 | 127 | A-713424.1 | asCfsagca(Agn)gaaucaCfuCfuuguusasc | 392 | GUAACAAGAGUGAUUCUUGCUGC | 657 |
| AD-367850.1 | A-713431.1 | asgsagugAfuUfCfUfugcugcuauuL96 | 128 | A-713432.1 | asAfsuagc(Agn)gcaagaAfuCfacucususg | 393 | CAAGAGUGAUUCUUGCUGCUAUU | 658 |
| AD-367851.1 | A-713433.1 | gsasgugaUfuCfUfUfgcugcuauuaL96 | 129 | A-713434.1 | usAfsauag(Cgn)agcaagAfaUfcacucsusu | 394 | AAGAGUGAUUCUUGCUGCUAUUA | 659 |
| AD-367853.1 | A-713437.1 | gsusgauuCfuUfGfCfugcuauuacuL96 | 130 | A-713438.1 | asGfsuaau(Agn)gcagcaAfgAfaucacsusc | 395 | GAGUGAUUCUUGCUGCUAUUACU | 660 |
| AD-367872.1 | A-713475.1 | ususggaaCfgCfCfCfuuuuacuaaaL96 | 131 | A-713476.1 | usUfsuagu(Agn)aaagggCfgUfuccaasgsu | 396 | ACUUGGAACGCCCUUUUACUAAA | 661 |
| AD-367873.1 | A-713477.1 | usgsgaacGfcCfCfUfuuuacuaaauL96 | 132 | A-713478.1 | asUfsuuag(Tgn)aaaaggGfcGfuuccasasg | 397 | CUUGGAACGCCCUUUUACUAAAC | 662 |
| AD-367875.1 | A-713481.1 | gsasacgcCfcUfUfUfuacuaaacuuL96 | 133 | A-713482.1 | asAfsguuu(Agn)guaaaaGfgGfcguucscsa | 398 | UGGAACGCCCUUUUACUAAACUU | 663 |
| AD-367876.1 | A-713483.1 | asascgccCfuUfUfUfacuaaacuuuL96 | 134 | A-713484.1 | asAfsaguu(Tgn)aguaaaAfgGfgcguuscsc | 399 | GGAACGCCCUUUUACUAAACUUG | 664 |
| AD-367877.1 | A-713485.1 | ascsgcccUfuUfUfAfcuaaacuugaL96 | 135 | A-713486.1 | usCfsaagu(Tgn)uaguaaAfaGfggcgususc | 400 | GAACGCCCUUUUACUAAACUUGA | 665 |
| AD-367878.1 | A-713487.1 | csgscccuUfuUfAfCfuaaacuugauL96 | 136 | A-713488.1 | asUfscaag(Tgn)uuaguaAfaAfgggcgsusu | 401 | AACGCCCUUUUACUAAACUUGAC | 666 |
| AD-367902.1 | A-713535.1 | gsusuucaGfuAfAfAfuucuuaccguL96 | 137 | A-713536.1 | asCfsggua(Agn)gaauuuAfcUfgaaacsusu | 402 | AAGUUUCAGUAAAUUCUUACCGU | 667 |
| AD-367903.1 | A-713537.1 | ususucagUfaAfAfUfucuuaccguuL96 | 138 | A-713538.1 | asAfscggu(Agn)agaauuUfaCfugaaascsu | 403 | AGUUUCAGUAAAUUCUUACCGUC | 668 |
| AD-367904.1 | A-713539.1 | ususcaguAfaAfUfUfcuuaccgucaL96 | 139 | A-713540.1 | usGfsacgg(Tgn)aagaauUfuAfcugaasasc | 404 | GUUUCAGUAAAUUCUUACCGUCA | 669 |
| AD-367905.1 | A-713541.1 | uscsaguaAfaUfUfCfuuaccgucaaL96 | 140 | A-713542.1 | usUfsgacg(Ggn)uaagaaUfuUfacugasasa | 405 | UUUCAGUAAAUUCUUACCGUCAA | 670 |
| AD-367906.1 | A-713543.1 | csasguaaAfuUfCfUfuaccgucaaaL96 | 141 | A-713544.1 | usUfsugac(Ggn)guaagaAfuUfuacugsasa | 406 | UUCAGUAAAUUCUUACCGUCAAA | 671 |
| AD-367907.1 | A-713545.1 | asgsuaaaUfuCfUfUfaccgucaaauL96 | 142 | A-713546.1 | asUfsuuga(Cgn)gguaagAfaUfuuacusgsa | 407 | UCAGUAAAUUCUUACCGUCAAAC | 672 |
| AD-367908.1 | A-713547.1 | gsusaaauUfcUfUfAfccgucaaacuL96 | 143 | A-713548.1 | asGfsuuug(Agn)cgguaaGfaAfuuuacsusg | 408 | CAGUAAAUUCUUACCGUCAAACU | 673 |
| AD-367909.1 | A-713549.1 | usasaauuCfuUfAfCfcgucaaacuuL96 | 144 | A-713550.1 | asAfsguuu(Ggn)acgguaAfgAfauuuascsu | 409 | AGUAAAUUCUUACCGUCAAACUG | 674 |
| AD-367910.1 | A-713551.1 | asasauucUfuAfCfCfgucaaacugaL96 | 145 | A-713552.1 | usCfsaguu(Tgn)gacgguAfaGfaauuusasc | 410 | GUAAAUUCUUACCGUCAAACUGA | 675 |
| AD-367911.1 | A-713553.1 | asasuucuUfaCfCfGfucaaacugauL96 | 146 | A-713554.1 | asUfscagu(Tgn)ugacggUfaAfgaauususa | 411 | UAAAUUCUUACCGUCAAACUGAC | 676 |
| AD-367912.1 | A-713555.1 | asusucuuAfcCfGfUfcaaacugacuL96 | 147 | A-713556.1 | asGfsucag(Tgn)uugacgGfuAfagaaususu | 412 | AAAUUCUUACCGUCAAACUGACG | 677 |
| AD-367913.1 | A-713557.1 | ususcuuaCfcGfUfCfaaacugacguL96 | 148 | A-713558.1 | asCfsguca(Ggn)uuugacGfgUfaagaasusu | 413 | AAUUCUUACCGUCAAACUGACGG | 678 |
| AD-367914.1 | A-713559.1 | uscsuuacCfgUfCfAfaacugacggaL96 | 149 | A-713560.1 | usCfscguc(Agn)guuugaCfgGfuaagasasu | 414 | AUUCUUACCGUCAAACUGACGGA | 679 |
| AD-367915.1 | A-713561.1 | csusuaccGfuCfAfAfacugacggauL96 | 150 | A-713562.1 | asUfsccgu(Cgn)aguuugAfcGfguaagsasa | 415 | UUCUUACCGUCAAACUGACGGAU | 680 |
| AD-367916.1 | A-713563.1 | ususaccgUfcAfAfAfcugacggauuL96 | 151 | A-713564.1 | asAfsuccg(Tgn)caguuuGfaCfgguaasgsa | 416 | UCUUACCGUCAAACUGACGGAUU | 681 |
| AD-367917.1 | A-713565.1 | usasccguCfaAfAfCfugacggauuaL96 | 152 | A-713566.1 | usAfsaucc(Ggn)ucaguuUfgAfcgguasasg | 417 | CUUACCGUCAAACUGACGGAUUA | 682 |
| AD-367918.1 | A-713567.1 | ascscgucAfaAfCfUfgacggauuauL96 | 153 | A-713568.1 | asUfsaauc(Cgn)gucaguUfuGfacggusasa | 418 | UUACCGUCAAACUGACGGAUUAU | 683 |
| AD-367925.1 | A-713581.1 | asascugaCfgGfAfUfuauuauuuauL96 | 154 | A-713582.1 | asUfsaaau(Agn)auaaucCfgUfcaguususg | 419 | CAAACUGACGGAUUAUUAUUUAU | 684 |
| AD-367950.1 | A-713631.1 | asgsuuugAfuGfAfGfgugaucacuuL96 | 155 | A-713632.1 | asAfsguga(Tgn)caccucAfuCfaaacususg | 420 | CAAGUUUGAUGAGGUGAUCACUG | 685 |
| AD-367967.1 | A-713665.1 | ascsugucUfaCfAfGfugguucaacuL96 | 156 | A-713666.1 | asGfsuuga(Agn)ccacugUfaGfacagusgsa | 421 | UCACUGUCUACAGUGGUUCAACU | 686 |
| AD-367968.1 | A-713667.1 | csusgucuAfcAfGfUfgguucaacuuL96 | 157 | A-713668.1 | asAfsguug(Agn)accacuGfuAfgacagsusg | 422 | CACUGUCUACAGUGGUUCAACUU | 687 |
| AD-367972.1 | A-713675.1 | csusacagUfgGfUfUfcaacuuuuaaL96 | 158 | A-713676.1 | usUfsaaaa(Ggn)uugaacCfaCfuguagsasc | 423 | GUCUACAGUGGUUCAACUUUUAA | 688 |
| AD-367973.1 | A-713677.1 | usascaguGfgUfUfCfaacuuuuaauL96 | 159 | A-713678.1 | asUfsuaaa(Agn)guugaaCfcAfcuguasgsa | 424 | UCUACAGUGGUUCAACUUUUAAG | 689 |
| AD-367982.1 | A-713695.1 | uscsaacuUfuUfAfAfguuaagggaaL96 | 160 | A-713696.1 | usUfscccu(Tgn)aacuuaAfaAfguugasasc | 425 | GUUCAACUUUUAAGUUAAGGGAA | 690 |
| AD-367984.1 | A-713699.1 | asascuuuUfaAfGfUfuaagggaaaaL96 | 161 | A-713700.1 | usUfsuucc(Cgn)uuaacuUfaAfaaguusgsa | 426 | UCAACUUUUAAGUUAAGGGAAAA | 691 |
| AD-368001.1 | A-713733.1 | asasaaacUfuUfUfAfcuuuguagauL96 | 162 | A-713734.1 | asUfscuac(Agn)aaguaaAfaGfuuuuuscsc | 427 | GGAAAAACUUUUACUUUGUAGAU | 692 |
| AD-385489.1 | A-748537.1 | cscsucagCfcUfAfCfgauuucuuuuL96 | 163 | A-748538.1 | asAfsaaga(Agn)aucguaGfgCfugaggscsa | 428 | UGCCUCAGCCUACGAUUUCUUUU | 693 |
| AD-385490.1 | A-748539.1 | csuscagcCfuAfCfGfauuucuuuugL96 | 164 | A-748540.1 | csAfsaaag(Agn)aaucguAfgGfcugagsgsc | 429 | GCCUCAGCCUACGAUUUCUUUUG | 694 |
| AD-385491.1 | A-748541.1 | uscsagccUfaCfGfAfuuucuuuugaL96 | 165 | A-748542.1 | usCfsaaaa(Ggn)aaaucgUfaGfgcugasgsg | 430 | CCUCAGCCUACGAUUUCUUUUGA | 695 |
| AD-385513.1 | A-707765.1 | gsasggauGfgUfUfCfauauacuuauL96 | 166 | A-748584.1 | asUfsaagu(Agn)uaugaaCfcAfuccucsasc | 431 | ATGAGGATGGTTCATATACTTAC | 696 |
| AD-385515.1 | A-707841.1 | asasugugAfaGfUfAfcaagugaaaaL96 | 167 | A-748586.1 | usUfsuuca(Cgn)uuguacUfuCfacauususc | 432 | CAAATGTGAAGTACAAGTGAAAA | 697 |
| AD-385521.1 | A-748597.1 | asgsgaugGfuUfCfAfuauacuuacuL96 | 168 | A-748598.1 | asGfsuaag(Tgn)auaugaAfcCfauccuscsa | 433 | UGAGGAUGGUUCAUAUACUUACG | 698 |
| AD-385557.1 | A-748669.1 | gsusgaagUfaCfAfAfgugaaaaacuL96 | 169 | A-748670.1 | asGfsuuuu(Tgn)cacuugUfaCfuucacsasu | 434 | AUGUGAAGUACAAGUGAAAAACG | 699 |
| AD-385589.1 | A-748731.1 | asasggagUfuUfUfUfaaaacauacaL96 | 170 | A-748732.1 | usGfsuaug(Tgn)uuuaaaAfaCfuccuuscsa | 435 | UGAAGGAGUUUUUAAAACAUACA | 700 |
| AD-385590.1 | A-748733.1 | asgsgaguUfuUfUfAfaaacauacauL96 | 171 | A-748734.1 | asUfsguau(Ggn)uuuuaaAfaAfcuccususc | 436 | GAAGGAGUUUUUAAAACAUACAG | 701 |
| AD-385601.1 | A-748755.1 | asasacauAfcAfGfUfccuaaguguuL96 | 172 | A-748756.1 | asAfscacu(Tgn)aggacuGfuAfuguuususa | 437 | UAAAACAUACAGUCCUAAGUGUG | 702 |
| AD-385602.1 | A-748757.1 | asascauaCfaGfUfCfcuaagugugaL96 | 173 | A-748758.1 | usCfsacac(Tgn)uaggacUfgUfauguususu | 438 | AAAACAUACAGUCCUAAGUGUGA | 703 |
| AD-385603.1 | A-748759.1 | ascsauacAfgUfCfCfuaagugugauL96 | 174 | A-748760.1 | asUfscaca(Cgn)uuaggaCfuGfuaugususu | 439 | AAACAUACAGUCCUAAGUGUGAC | 704 |
| AD-385640.1 | A-748829.1 | gscsugcaCfaUfGfAfgaaaaguacaL96 | 175 | A-748830.1 | usGfsuacu(Tgn)uucucaUfgUfgcagcsasu | 440 | AUGCUGCACAUGAGAAAAGUACA | 705 |
| AD-385641.1 | A-748831.1 | csusgcacAfuGfAfGfaaaaguacauL96 | 176 | A-748832.1 | asUfsguac(Tgn)uuucucAfuGfugcagscsa | 441 | UGCUGCACAUGAGAAAAGUACAG | 706 |
| AD-385660.1 | A-748869.1 | asusggagAfgUfGfUfuuuguucaaaL96 | 177 | A-748870.1 | usUfsugaa(Cgn)aaaacaCfuCfuccaususa | 442 | UAAUGGAGAGUGUUUUGUUCAAA | 707 |
| AD-385662.1 | A-748873.1 | gsgsagagUfgUfUfUfuguucaaauuL96 | 178 | A-748874.1 | asAfsuuug(Agn)acaaaaCfaCfucuccsasu | 443 | AUGGAGAGUGUUUUGUUCAAAUG | 708 |
| AD-385671.1 | A-748891.1 | ususuguuCfaAfAfUfgcucagacuuL96 | 179 | A-748892.1 | asAfsgucu(Ggn)agcauuUfgAfacaaasasc | 444 | GUUUUGUUCAAAUGCUCAGACUU | 709 |
| AD-385675.1 | A-748897.1 | usgsuucaAfaUfGfCfucagacuucuL96 | 180 | A-748898.1 | asGfsaagu(Cgn)ugagcaUfuUfgaacasasa | 445 | UUUGUUCAAAUGCUCAGACUUCG | 710 |
| AD-385676.1 | A-748899.1 | gsusucaaAfuGfCfUfcagacuucguL96 | 181 | A-748900.1 | asCfsgaag(Tgn)cugagcAfuUfugaacsasa | 446 | UUGUUCAAAUGCUCAGACUUCGU | 711 |
| AD-385677.1 | A-748901.1 | ususcaaaUfgCfUfCfagacuucguuL96 | 182 | A-748902.1 | asAfscgaa(Ggn)ucugagCfaUfuugaascsa | 447 | UGUUCAAAUGCUCAGACUUCGUU | 712 |
| AD-385678.1 | A-748903.1 | uscsaaauGfcUfCfAfgacuucguuuL96 | 183 | A-748904.1 | asAfsacga(Agn)gucugaGfcAfuuugasasc | 448 | GUUCAAAUGCUCAGACUUCGUUG | 713 |
| AD-385679.1 | A-748905.1 | csasaaugCfuCfAfGfacuucguuguL96 | 184 | A-748906.1 | asCfsaacg(Agn)agucugAfgCfauuugsasa | 449 | UUCAAAUGCUCAGACUUCGUUGU | 714 |
| AD-385680.1 | A-748907.1 | asasaugcUfcAfGfAfcuucguuguuL96 | 185 | A-748908.1 | asAfscaac(Ggn)aagucuGfaGfcauuusgsa | 450 | UCAAAUGCUCAGACUUCGUUGUG | 715 |
| AD-385681.1 | A-748909.1 | asasugcuCfaGfAfCfuucguuguguL96 | 186 | A-748910.1 | asCfsacaa(Cgn)gaagucUfgAfgcauususg | 451 | CAAAUGCUCAGACUUCGUUGUGG | 716 |
| AD-385834.1 | A-749211.1 | ascsauguUfuCfGfAfuauaaugaauL96 | 187 | A-749212.1 | asUfsucau(Tgn)auaucgAfaAfcauguscsa | 452 | UGACAUGUUUCGAUAUAAUGAAG | 717 |
| AD-385889.1 | A-749321.1 | ususuaucUfuCfAfUfauacgguucuL96 | 188 | A-749322.1 | asGfsaacc(Ggn)uauaugAfaGfauaaascsu | 453 | AGUUUAUCUUCAUAUACGGUUCC | 718 |
| AD-385917.1 | A-749377.1 | asgsggacAfaCfUfCfagaagaauuuL96 | 189 | A-749378.1 | asAfsauuc(Tgn)ucugagUfuGfucccususu | 454 | AAAGGGACAACUCAGAAGAAUUU | 719 |
| AD-385918.1 | A-749379.1 | gsgsgacaAfcUfCfAfgaagaauuucL96 | 190 | A-749380.1 | gsAfsaauu(Cgn)uucugaGfuUfgucccsusu | 455 | AAGGGACAACUCAGAAGAAUUUC | 720 |
| AD-385919.1 | A-749381.1 | gsgsacaaCfuCfAfGfaagaauuucuL96 | 191 | A-749382.1 | asGfsaaau(Tgn)cuucugAfgUfuguccscsu | 456 | AGGGACAACUCAGAAGAAUUUCU | 721 |
| AD-385920.1 | A-749383.1 | gsascaacUfcAfGfAfagaauuucuuL96 | 192 | A-749384.1 | asAfsgaaa(Tgn)ucuucuGfaGfuugucscsc | 457 | GGGACAACUCAGAAGAAUUUCUU | 722 |
| AD-386134.1 | A-709229.1 | csusucucAfcAfCfUfucagauuucaL96 | 193 | A-749805.1 | usGfsaaau(Cgn)ugaaguGfuGfagaagscsa | 458 | CACTTCTCACACTTCAGATTTCA | 723 |
| AD-386135.1 | A-709231.1 | ususcucaCfaCfUfUfcagauuucaaL96 | 194 | A-749806.1 | usUfsgaaa(Tgn)cugaagUfgUfgagaasgsc | 459 | ACTTCTCACACTTCAGATTTCAA | 724 |
| AD-386136.1 | A-709299.1 | uscsagacCfaAfAfGfaguaguuaauL96 | 195 | A-749807.1 | asUfsuaac(Tgn)acucuuUfgGfucugasgsc | 460 | GTTCAGACCAAAGAGTAGTTAAT | 725 |
| AD-386137.1 | A-709301.1 | csasgaccAfaAfGfAfguaguuaauuL96 | 196 | A-749808.1 | asAfsuuaa(Cgn)uacucuUfuGfgucugsasg | 461 | TTCAGACCAAAGAGTAGTTAATG | 726 |
| AD-386149.1 | A-749831.1 | usgscuucUfcAfCfAfcuucagauuuL96 | 197 | A-749832.1 | asAfsaucu(Ggn)aaguguGfaGfaagcasgsc | 462 | GCUGCUUCUCACACUUCAGAUUU | 727 |
| AD-386150.1 | A-749833.1 | gscsuucuCfaCfAfCfuucagauuucL96 | 198 | A-749834.1 | gsAfsaauc(Tgn)gaagugUfgAfgaagcsasg | 463 | CUGCUUCUCACACUUCAGAUUUC | 728 |
| AD-386254.1 | A-750039.1 | usasgaauUfuGfUfAfucccacaauuL96 | 199 | A-750040.1 | asAfsuugu(Ggn)ggauacAfaAfuucuasgsg | 464 | CCUAGAAUUUGUAUCCCACAAUC | 729 |
| AD-386255.1 | A-750041.1 | asgsaauuUfgUfAfUfcccacaaucuL96 | 200 | A-750042.1 | asGfsauug(Tgn)gggauaCfaAfauucusasg | 465 | CUAGAAUUUGUAUCCCACAAUCC | 730 |
| AD-386256.1 | A-750043.1 | gsasauuuGfuAfUfCfccacaauccuL96 | 201 | A-750044.1 | asGfsgauu(Ggn)ugggauAfcAfaauucsusa | 466 | UAGAAUUUGUAUCCCACAAUCCC | 731 |
| AD-386498.1 | A-750524.1 | gsusgaaaCfaUfCfAfccuagcuuuuL96 | 202 | A-750525.1 | asAfsaagc(Tgn)aggugaUfgUfuucacsusu | 467 | AAGUGAAACAUCACCUAGCUUUU | 732 |
| AD-386499.1 | A-750526.1 | usgsaaacAfuCfAfCfcuagcuuuucL96 | 203 | A-750527.1 | gsAfsaaag(Cgn)uaggugAfuGfuuucascsu | 468 | AGUGAAACAUCACCUAGCUUUUC | 733 |
| AD-386500.1 | A-750528.1 | gsasaacaUfcAfCfCfuagcuuuucaL96 | 204 | A-750529.1 | usGfsaaaa(Ggn)cuagguGfaUfguuucsasc | 469 | GUGAAACAUCACCUAGCUUUUCA | 734 |
| AD-386501.1 | A-750530.1 | asasacauCfaCfCfUfagcuuuucaaL96 | 205 | A-750531.1 | usUfsgaaa(Agn)gcuaggUfgAfuguuuscsa | 470 | UGAAACAUCACCUAGCUUUUCAA | 735 |
| AD-386502.1 | A-750532.1 | asascaucAfcCfUfAfgcuuuucaaaL96 | 206 | A-750533.1 | usUfsugaa(Agn)agcuagGfuGfauguususc | 471 | GAAACAUCACCUAGCUUUUCAAA | 736 |
| AD-386503.1 | A-750534.1 | ascsaucaCfcUfAfGfcuuuucaaaaL96 | 207 | A-750535.1 | usUfsuuga(Agn)aagcuaGfgUfgaugususu | 472 | AAACAUCACCUAGCUUUUCAAAA | 737 |
| AD-386504.1 | A-750536.1 | csasucacCfuAfGfCfuuuucaaaauL96 | 208 | A-750537.1 | asUfsuuug(Agn)aaagcuAfgGfugaugsusu | 473 | AACAUCACCUAGCUUUUCAAAAG | 738 |
| AD-386505.1 | A-750538.1 | asuscaccUfaGfCfUfuuucaaaaguL96 | 209 | A-750539.1 | asCfsuuuu(Ggn)aaaagcUfaGfgugausgsu | 474 | ACAUCACCUAGCUUUUCAAAAGC | 739 |
| AD-386506.1 | A-750540.1 | uscsaccuAfgCfUfUfuucaaaagcuL96 | 210 | A-750541.1 | asGfscuuu(Tgn)gaaaagCfuAfggugasusg | 475 | CAUCACCUAGCUUUUCAAAAGCU | 740 |
| AD-386507.1 | A-750542.1 | csasccuaGfcUfUfUfucaaaagcuuL96 | 211 | A-750543.1 | asAfsgcuu(Tgn)ugaaaaGfcUfaggugsasu | 476 | AUCACCUAGCUUUUCAAAAGCUG | 741 |
| AD-386508.1 | A-750544.1 | ascscuagCfuUfUfUfcaaaagcugaL96 | 212 | A-750545.1 | usCfsagcu(Tgn)uugaaaAfgCfuaggusgsa | 477 | UCACCUAGCUUUUCAAAAGCUGA | 742 |
| AD-386509.1 | A-750546.1 | cscsuagcUfuUfUfCfaaaagcugauL96 | 213 | A-750547.1 | asUfscagc(Tgn)uuugaaAfaGfcuaggsusg | 478 | CACCUAGCUUUUCAAAAGCUGAC | 743 |
| AD-386595.1 | A-710459.1 | uscsugaaUfcUfAfUfggaucaacuaL96 | 214 | A-750716.1 | usAfsguug(Agn)uccauaGfaUfucagasusg | 479 | CTTCTGAATCTATGGATCAACTA | 744 |
| AD-386596.1 | A-710461.1 | csusgaauCfuAfUfGfgaucaacuauL96 | 215 | A-750717.1 | asUfsaguu(Ggn)auccauAfgAfuucagsasu | 480 | TTCTGAATCTATGGATCAACTAC | 745 |
| AD-386617.1 | A-750758.1 | csasucugAfaUfCfUfauggaucaauL96 | 216 | A-750759.1 | asUfsugau(Cgn)cauagaUfuCfagaugsusa | 481 | UACAUCUGAAUCUAUGGAUCAAC | 746 |
| AD-386618.1 | A-750760.1 | asuscugaAfuCfUfAfuggaucaacuL96 | 217 | A-750761.1 | asGfsuuga(Tgn)ccauagAfuUfcagausgsu | 482 | ACAUCUGAAUCUAUGGAUCAACU | 747 |
| AD-386619.1 | A-750762.1 | asuscuauGfgAfUfCfaacuacuaauL96 | 218 | A-750763.1 | asUfsuagu(Agn)guugauCfcAfuagaususc | 483 | GAAUCUAUGGAUCAACUACUAAG | 748 |
| AD-386620.1 | A-750764.1 | uscsuaugGfaUfCfAfacuacuaaguL96 | 219 | A-750765.1 | asCfsuuag(Tgn)aguugaUfcCfauagasusu | 484 | AAUCUAUGGAUCAACUACUAAGC | 749 |
| AD-386621.1 | A-750766.1 | csusauggAfuCfAfAfcuacuaagcaL96 | 220 | A-750767.1 | usGfscuua(Ggn)uaguugAfuCfcauagsasu | 485 | AUCUAUGGAUCAACUACUAAGCA | 750 |
| AD-386622.1 | A-750768.1 | usasuggaUfcAfAfCfuacuaagcaaL96 | 221 | A-750769.1 | usUfsgcuu(Agn)guaguuGfaUfccauasgsa | 486 | UCUAUGGAUCAACUACUAAGCAA | 751 |
| AD-386623.1 | A-750770.1 | asusggauCfaAfCfUfacuaagcaaaL96 | 222 | A-750771.1 | usUfsugcu(Tgn)aguaguUfgAfuccausasg | 487 | CUAUGGAUCAACUACUAAGCAAA | 752 |
| AD-386624.1 | A-750772.1 | usgsgaucAfaCfUfAfcuaagcaaaaL96 | 223 | A-750773.1 | usUfsuugc(Tgn)uaguagUfuGfauccasusa | 488 | UAUGGAUCAACUACUAAGCAAAA | 753 |
| AD-386625.1 | A-750774.1 | gsgsaucaAfcUfAfCfuaagcaaaaaL96 | 224 | A-750775.1 | usUfsuuug(Cgn)uuaguaGfuUfgauccsasu | 489 | AUGGAUCAACUACUAAGCAAAAA | 754 |
| AD-386626.1 | A-750776.1 | gsasucaaCfuAfCfUfaagcaaaaauL96 | 225 | A-750777.1 | asUfsuuuu(Ggn)cuuaguAfgUfugaucscsa | 490 | UGGAUCAACUACUAAGCAAAAAU | 755 |
| AD-386647.1 | A-750818.1 | asasggagAfaAfAfGfucacgagauuL96 | 226 | A-750819.1 | asAfsucuc(Ggn)ugacuuUfuCfuccuuscsu | 491 | AGAAGGAGAAAAGUCACGAGAUU | 756 |
| AD-386848.1 | A-751213.1 | gsgsaguuCfaAfCfCfcucguucuuuL96 | 227 | A-751214.1 | asAfsagaa(Cgn)gaggguUfgAfacuccsusu | 492 | AAGGAGUUCAACCCUCGUUCUUU | 757 |
| AD-386851.1 | A-751219.1 | gsusucaaCfcCfUfCfguucuuucuuL96 | 228 | A-751220.1 | asAfsgaaa(Ggn)aacgagGfgUfugaacsusc | 493 | GAGUUCAACCCUCGUUCUUUCUC | 758 |
| AD-386852.1 | A-751221.1 | ususcaacCfcUfCfGfuucuuucucuL96 | 229 | A-751222.1 | asGfsagaa(Agn)gaacgaGfgGfuugaascsu | 494 | AGUUCAACCCUCGUUCUUUCUCU | 759 |
| AD-386853.1 | A-751223.1 | uscsaaccCfuCfGfUfucuuucucuuL96 | 230 | A-751224.1 | asAfsgaga(Agn)agaacgAfgGfguugasasc | 495 | GUUCAACCCUCGUUCUUUCUCUC | 760 |
| AD-386860.1 | A-751231.1 | csasacccUfcGfUfUfcuuucucucaL96 | 231 | A-751232.1 | usGfsagag(Agn)aagaacGfaGfgguugsasa | 496 | UUCAACCCUCGUUCUUUCUCUCA | 761 |
| AD-386861.1 | A-751233.1 | asascccuCfgUfUfCfuuucucucauL96 | 232 | A-751234.1 | asUfsgaga(Ggn)aaagaaCfgAfggguusgsa | 497 | UCAACCCUCGUUCUUUCUCUCAG | 762 |
| AD-386867.1 | A-751245.1 | csgsuucuUfuCfUfCfucagccaaauL96 | 233 | A-751246.1 | asUfsuugg(Cgn)ugagagAfaAfgaacgsasg | 498 | CUCGUUCUUUCUCUCAGCCAAAG | 763 |
| AD-386868.1 | A-751247.1 | gsusucuuUfcUfCfUfcagccaaaguL96 | 234 | A-751248.1 | asCfsuuug(Ggn)cugagaGfaAfagaacsgsa | 499 | UCGUUCUUUCUCUCAGCCAAAGC | 764 |
| AD-387208.1 | A-751921.1 | asgsuccuGfuCfAfUfacaagguaauL96 | 235 | A-751922.1 | asUfsuacc(Tgn)uguaugAfcAfggacusgsu | 500 | ACAGUCCUGUCAUACAAGGUAAU | 765 |
| AD-387209.1 | A-751923.1 | gsusccugUfcAfUfAfcaagguaauuL96 | 236 | A-751924.1 | asAfsuuac(Cgn)uuguauGfaCfaggacsusg | 501 | CAGUCCUGUCAUACAAGGUAAUG | 766 |
| AD-387213.1 | A-751931.1 | usgsucauAfcAfAfGfguaaugccauL96 | 237 | A-751932.1 | asUfsggca(Tgn)uaccuuGfuAfugacasgsg | 502 | CCUGUCAUACAAGGUAAUGCCAG | 767 |
| AD-387214.1 | A-751933.1 | gsuscauaCfaAfGfGfuaaugccaguL96 | 238 | A-751934.1 | asCfsuggc(Agn)uuaccuUfgUfaugacsasg | 503 | CUGUCAUACAAGGUAAUGCCAGG | 768 |
| AD-387303.1 | A-752109.1 | uscsuacuUfuGfCfCfauuuccaccuL96 | 239 | A-752110.1 | asGfsgugg(Agn)aauggcAfaAfguagasasa | 504 | UUUCUACUUUGCCAUUUCCACCG | 769 |
| AD-387636.1 | A-752766.1 | asasgcacAfgAfAfAfacuagaacuuL96 | 240 | A-752767.1 | asAfsguuc(Tgn)aguuuuCfuGfugcuuscsc | 505 | GGAAGCACAGAAAACUAGAACUU | 770 |
| AD-387638.1 | A-752770.1 | gscsacagAfaAfAfCfuagaacuucaL96 | 241 | A-752771.1 | usGfsaagu(Tgn)cuaguuUfuCfugugcsusu | 506 | AAGCACAGAAAACUAGAACUUCA | 771 |
| AD-387640.1 | A-752774.1 | ascsagaaAfaCfUfAfgaacuucauuL96 | 242 | A-752775.1 | asAfsugaa(Ggn)uucuagUfuUfucugusgsc | 507 | GCACAGAAAACUAGAACUUCAUU | 772 |
| AD-387641.1 | A-752776.1 | csasgaaaAfcUfAfGfaacuucauuuL96 | 243 | A-752777.1 | asAfsauga(Agn)guucuaGfuUfuucugsusg | 508 | CACAGAAAACUAGAACUUCAUUG | 773 |
| AD-387777.1 | A-713323.1 | gsasaacuGfgAfAfGfuuauuuauuuL96 | 244 | A-753048.1 | asAfsauaa(Agn)uaacuuCfcAfguuucsasg | 509 | CCGAAACTGGAAGTTATTTATTT | 774 |
| AD-387779.1 | A-713361.1 | asgsucauGfaAfCfAfcaucagcuauL96 | 245 | A-753050.1 | asUfsagcu(Ggn)auguguUfcAfugacuscsu | 510 | AAAGTCATGAACACATCAGCTAG | 775 |
| AD-387780.1 | A-713363.1 | gsuscaugAfaCfAfCfaucagcuaguL96 | 246 | A-753051.1 | asCfsuagc(Tgn)gaugugUfuCfaugacsusc | 511 | AAGTCATGAACACATCAGCTAGC | 776 |
| AD-387806.1 | A-753102.1 | usgscuugCfuGfAfAfacuggaaguuL96 | 247 | A-753103.1 | asAfscuuc(Cgn)aguuucAfgCfaagcasgsa | 512 | UCUGCUUGCUGAAACUGGAAGUU | 777 |
| AD-387812.1 | A-753114.1 | csusgaaaCfuGfGfAfaguuauuuauL96 | 248 | A-753115.1 | asUfsaaau(Agn)acuuccAfgUfuucagscsa | 513 | UGCUGAAACUGGAAGUUAUUUAU | 778 |
| AD-387813.1 | A-753116.1 | usgsaaacUfgGfAfAfguuauuuauuL96 | 249 | A-753117.1 | asAfsuaaa(Tgn)aacuucCfaGfuuucasgsc | 514 | GCUGAAACUGGAAGUUAUUUAUU | 779 |
| AD-387825.1 | A-753140.1 | ususgagaGfuCfAfUfgaacacaucaL96 | 250 | A-753141.1 | usGfsaugu(Ggn)uucaugAfcUfcucaasgsg | 515 | CCUUGAGAGUCAUGAACACAUCA | 780 |
| AD-387830.1 | A-753150.1 | asusgaacAfcAfUfCfagcuagcaauL96 | 251 | A-753151.1 | asUfsugcu(Agn)gcugauGfuGfuucausgsa | 516 | UCAUGAACACAUCAGCUAGCAAC | 781 |
| AD-387831.1 | A-713411.1 | asgsaaguAfaCfAfAfgagugauucuL96 | 252 | A-753152.1 | asGfsaauc(Agn)cucuugUfuAfcuucusgsu | 517 | AAAGAAGTAACAAGAGTGATTCT | 782 |
| AD-387833.1 | A-753154.1 | usgsaacaCfaUfCfAfgcuagcaacaL96 | 253 | A-753155.1 | usGfsuugc(Tgn)agcugaUfgUfguucasusg | 518 | CAUGAACACAUCAGCUAGCAACA | 783 |
| AD-387840.1 | A-753168.1 | asuscagcUfaGfCfAfacagaaguaaL96 | 254 | A-753169.1 | usUfsacuu(Cgn)uguugcUfaGfcugausgsu | 519 | ACAUCAGCUAGCAACAGAAGUAA | 784 |
| AD-387842.1 | A-753172.1 | csasgcuaGfcAfAfCfagaaguaacaL96 | 255 | A-753173.1 | usGfsuuac(Tgn)ucuguuGfcUfagcugsasu | 520 | AUCAGCUAGCAACAGAAGUAACA | 785 |
| AD-387845.1 | A-753178.1 | csusagcaAfcAfGfAfaguaacaagaL96 | 256 | A-753179.1 | usCfsuugu(Tgn)acuucuGfuUfgcuagscsu | 521 | AGCUAGCAACAGAAGUAACAAGA | 786 |
| AD-387846.1 | A-753180.1 | usasgcaaCfaGfAfAfguaacaagauL96 | 257 | A-753181.1 | asUfscuug(Tgn)uacuucUfgUfugcuasgsc | 522 | GCUAGCAACAGAAGUAACAAGAG | 787 |
| AD-387858.1 | A-753204.1 | csusugcuGfcUfAfUfuaccgcuuuaL96 | 258 | A-753205.1 | usAfsaagc(Ggn)guaauaGfcAfgcaagsasa | 523 | UUCUUGCUGCUAUUACCGCUUUA | 788 |
| AD-387861.1 | A-753210.1 | gscsugcuAfuUfAfCfcgcuuuaaaaL96 | 259 | A-753211.1 | usUfsuuaa(Agn)gcgguaAfuAfgcagcsasa | 524 | UUGCUGCUAUUACCGCUUUAAAA | 789 |
| AD-387863.1 | A-753214.1 | cscscuuuUfaCfUfAfaacuugacauL96 | 260 | A-753215.1 | asUfsguca(Agn)guuuagUfaAfaagggscsg | 525 | CGCCCUUUUACUAAACUUGACAG | 790 |
| AD-387865.1 | A-753218.1 | csusuuuaCfuAfAfAfcuugacagaaL96 | 261 | A-753219.1 | usUfscugu(Cgn)aaguuuAfgUfaaaagsgsg | 526 | CCCUUUUACUAAACUUGACAGAA | 791 |
| AD-387866.1 | A-753220.1 | ususuuacUfaAfAfCfuugacagaauL96 | 262 | A-753221.1 | asUfsucug(Tgn)caaguuUfaGfuaaaasgsg | 527 | CCUUUUACUAAACUUGACAGAAG | 792 |
| AD-387869.1 | A-753226.1 | usascuaaAfcUfUfGfacagaaguuuL96 | 263 | A-753227.1 | asAfsacuu(Cgn)ugucaaGfuUfuaguasasa | 528 | UUUACUAAACUUGACAGAAGUUC | 793 |
| AD-387871.1 | A-753230.1 | csusaaacUfuGfAfCfagaaguucauL96 | 264 | A-753231.1 | asUfsgaac(Tgn)ucugucAfaGfuuuagsusa | 529 | UACUAAACUUGACAGAAGUUCAG | 794 |
| AD-387875.1 | A-753238.1 | ascsuugaCfaGfAfAfguucaguaaaL96 | 265 | A-753239.1 | usUfsuacu(Ggn)aacuucUfgUfcaagususu | 530 | AAACUUGACAGAAGUUCAGUAAA | 795 |
| AD-387878.1 | A-753244.1 | usgsacagAfaGfUfUfcaguaaauuuL96 | 266 | A-753245.1 | asAfsauuu(Agn)cugaacUfuCfugucasasg | 531 | CUUGACAGAAGUUCAGUAAAUUC | 796 |
| AD-387880.1 | A-753248.1 | ascsagaaGfuUfCfAfguaaauucuuL96 | 267 | A-753249.1 | asAfsgaau(Tgn)uacugaAfcUfucuguscsa | 532 | UGACAGAAGUUCAGUAAAUUCUU | 797 |
| AD-387881.1 | A-753250.1 | csasgaagUfuCfAfGfuaaauucuuaL96 | 268 | A-753251.1 | usAfsagaa(Tgn)uuacugAfaCfuucugsusc | 533 | GACAGAAGUUCAGUAAAUUCUUA | 798 |
| AD-387882.1 | A-753252.1 | asgsaaguUfcAfGfUfaaauucuuauL96 | 269 | A-753253.1 | asUfsaaga(Agn)uuuacuGfaAfcuucusgsu | 534 | ACAGAAGUUCAGUAAAUUCUUAC | 799 |
| AD-387909.1 | A-753302.1 | cscsaaacUfgAfCfGfgauuauuauuL96 | 270 | A-753303.1 | asAfsuaau(Agn)auccguCfaGfuuuggscsg | 535 | CGCCAAACUGACGGAUUAUUAUU | 800 |
| AD-387937.1 | A-713735.1 | asasaacuUfuUfAfCfuuuguagauaL96 | 271 | A-753358.1 | usAfsucua(Cgn)aaaguaAfaAfguuuuscsc | 536 | GAAAAACTTTTACTTTGTAGATA | 801 |
| AD-387940.1 | A-753362.1 | gsusuaagGfgAfAfAfacuuuuacuuL96 | 272 | A-753363.1 | asAfsguaa(Agn)aguuuuCfcCfuuaacsusu | 537 | AAGUUAAGGGAAAACUUUUACUU | 802 |
| AD-387941.1 | A-753364.1 | ususaaggGfaAfAfAfcuuuuacuuuL96 | 273 | A-753365.1 | asAfsagua(Agn)aaguuuUfcCfcuuaascsu | 538 | AGUUAAGGGAAAACUUUUACUUU | 803 |
| AD-387942.1 | A-753366.1 | usasagggAfaAfAfCfuuuuacuuugL96 | 274 | A-753367.1 | csAfsaagu(Agn)aaaguuUfuCfccuuasasc | 539 | GUUAAGGGAAAACUUUUACUUUG | 804 |
| AD-387944.1 | A-753370.1 | asgsggaaAfaCfUfUfuuacuuuguaL96 | 275 | A-753371.1 | usAfscaaa(Ggn)uaaaagUfuUfucccususa | 540 | UAAGGGAAAACUUUUACUUUGUA | 805 |
| AD-387945.1 | A-753372.1 | gsgsgaaaAfcUfUfUfuacuuuguauL96 | 276 | A-753373.1 | asUfsacaa(Agn)guaaaaGfuUfuucccsusu | 541 | AAGGGAAAACUUUUACUUUGUAG | 806 |
| AD-387947.1 | A-753376.1 | gsasaaacUfuUfUfAfcuuuguagauL96 | 277 | A-753377.1 | asUfscuac(Agn)aaguaaAfaGfuuuucscsc | 542 | GGGAAAACUUUUACUUUGUAGAU | 807 |

TABLE 3
Unmodified Sense and Antisense Strand Sequences of Human and Rodent ATXN2 siRNAs.

| | Sense | | | | | Antisense | | | | |
|---|---|---|---|---|---|---|---|---|---|---|
| Duplex | Oligo | | | | | Oligo | | | | |
| Name | Name | transSeq | Seq | Source Name | Range | Name | transSeq | Seq | Source Name | Range |
| AD- | A- | UCCGACUUCCGGUAAAGAGUU | 808 | NM_002973.3_ | 92- | A- | AACUCUTUACCGGAAGUCGGAGG | 1083 | NM_002973.3_ | 90- |
| 364136.1 | 706003.1 | | | 92-112_C21U_s | 112 | 706004.1 | | | 90-112_G1A_as | 112 |
| AD- | A- | CCGACUUCCGGUAAAGAGUCU | 809 | NM_002973.3_ | 93- | A- | AGACUCTUUACCGGAAGUCGGAG | 1084 | NM_002973.3_ | 91- |
| 364137.1 | 706005.1 | | | 93-113_C21U_s | 113 | 706006.1 | | | 91-113_G1A_as | 113 |
| AD- | A- | CGACUUCCGGUAAAGAGUCCU | 810 | NM_002973.3_ | 94- | A- | AGGACUCUUUACCGGAAGUCGGA | 1085 | NM_002973.3_ | 92- |
| 364138.1 | 706007.1 | | | 94-114_C21U_s | 114 | 706008.1 | | | 92-114_G1A_as | 114 |
| AD- | A- | AAUGUGAAGUACAAGUGAAAA | 811 | NM_002973.3_ | 998- | A- | UUUUCACUUGUACUUCACAUUUG | 1086 | NM_002973.3_ | 996- |
| 365055.1 | 707841.1 | | | 998-1018_s | 1018 | 707842.1 | | | 996-1018_as | 1018 |
| AD- | A- | AUGUGAAGUACAAGUGAAAAA | 812 | NM_002973.3_ | 999- | A- | UUUUUCACUUGUACUUCACAUUU | 1087 | NM_002973.3_ | 997- |
| 365056.1 | 707843.1 | | | 999-1019_s | 1019 | 707844.1 | | | 997-1019_as | 1019 |
| AD- | A- | CAUGAGAAAAGUACAGAAUCU | 813 | NM_002973.3_ | 1087- | A- | AGAUUCTGUACUUUUCUCAUGUG | 1088 | NM_002973.3_ | 1085- |
| 365144.1 | 708019.1 | | | 1087- | 1107 | 708020.1 | | | 1085-1107_G1A_as | 1107 |
| | | | | 1107_C21U_s | | | | | | |
| AD- | A- | CACUUCUCACACUUCAGAUUU | 814 | NM_002973.3_ | 1746- | A- | AAAUCUGAAGUGUGAGAAGUGGA | 1089 | NM_002973.3_1744- | 1744- |
| 365747.1 | 709225.1 | | | 1746-1766_s | 1766 | 709226.1 | | | 1766_as | 1766 |
| AD- | A- | ACUUCUCACACUUCAGAUUUC | 815 | NM_002973.3_ | 1747- | A- | GAAAUCTGAAGUGUGAGAAGUGG | 1090 | NM_002973.3_1745- | 1745- |
| 365748.1 | 709227.1 | | | 1747-1767_s | 1767 | 709228.1 | | | 1767_as | 1767 |
| AD- | A- | CUUCUCACACUUCAGAUUUCA | 816 | NM_002973.3_ | 1748- | A- | UGAAAUCUGAAGUGUGAGAAGUG | 1091 | NM_002973.3_1746- | 1746- |
| 365749.1 | 709229.1 | | | 1748-1768_s | 1768 | 709230.1 | | | 1768_as | 1768 |
| AD- | A- | UUCUCACACUUCAGAUUUCAA | 817 | NM_002973.3_ | 1749- | A- | UUGAAATCUGAAGUGUGAGAAGU | 1092 | NM_002973.3_1747- | 1747- |
| 365750.1 | 709231.1 | | | 1749-1769_s | 1769 | 709232.1 | | | 1769_as | 1769 |
| AD- | A- | UCUCACACUUCAGAUUUCAAU | 818 | NM_002973.3_ | 1750- | A- | AUUGAAAUCUGAAGUGUGAGAAG | 1093 | NM_002973.3_1748- | 1748- |
| 365751.1 | 709233.1 | | | 1750- | 1770 | 709234.1 | | | 1770_G1A_as | 1770 |
| | | | | 1770_C21U_s | | | | | | |
| AD- | A- | CUCACACUUCAGAUUUCAACU | 819 | NM_002973.3_ | 1751- | A- | AGUUGAAAUCUGAAGUGUGAGAA | 1094 | NM_002973.3_1749- | 1749- |
| 365752.1 | 709235.1 | | | 1751- | 1771 | 709236.1 | | | 1771_G1A_as | 1771 |
| | | | | 1771_C21U_s | | | | | | |
| AD- | A- | UCACACUUCAGAUUUCAACCU | 820 | NM_002973.3_ | 1752- | A- | AGGUUGAAAUCUGAAGUGUGAGA | 1095 | NM_002973.3_1750- | 1750- |
| 365753.1 | 709237.1 | | | 1752- | 1772 | 709238.1 | | | 1772_G1A_as | 1772 |
| | | | | 1772_C21U_s | | | | | | |
| AD- | A- | CACACUUCAGAUUUCAACCCU | 821 | NM_002973.3_ | 1753- | A- | AGGGUUGAAAUCUGAAGUGUGAG | 1096 | NM_002973.3_1751- | 1751- |
| 365754.1 | 709239.1 | | | 1753- | 1773 | 709240.1 | | | 1773_C1A_as | 1773 |
| | | | | 1773_G21U_s | | | | | | |
| AD- | A- | ACUUCAGAUUUCAACCCGAAU | 822 | NM_002973.3_ | 1756- | A- | AUUCGGGUUGAAAUCUGAAGUGU | 1097 | NM_002973.3_1754- | 1754- |
| 365757.1 | 709245.1 | | | 1756-1776_s | 1776 | 709246.1 | | | 1776_as | 1776 |
| AD- | A- | UCAGACCAAAGAGUAGUUAAU | 823 | NM_002973.3_ | 1783- | A- | AUUAACTACUCUUUGGUCUGAAC | 1098 | NM_002973.3_1781- | 1781- |
| 365784.1 | 709299.1 | | | 1783-1803_s | 1803 | 709300.1 | | | 1803_as | 1803 |
| AD- | A- | CAGACCAAAGAGUAGUUAAUU | 824 | NM_002973.3_ | 1784- | A- | AAUUAACUACUCUUUGGUCUGAA | 1099 | NM_002973.3_1782- | 1782- |
| 365785.1 | 709301.1 | | | 1784- | 1804 | 709302.1 | | | 1804_C1A_as | 1804 |
| | | | | 1804_G21U_s | | | | | | |
| AD- | A- | CUCUACUAUGCCUAAACGCAU | 825 | NM_002973.3_ | 1986- | A- | AUGCGUTUAGGCAUAGUAGAGAC | 1100 | NM_002973.3_1984- | 1984- |
| 365915.1 | 709561.1 | | | 1986-2006_s | 2006 | 709562.1 | | | 2006_as | 2006 |
| AD- | A- | UCUACUAUGCCUAAACGCAUU | 826 | NM_002973.3_ | 1987- | A- | AAUGCGTUUAGGCAUAGUAGAGA | 1101 | NM_002973.3_1985- | 1985- |
| 365916.1 | 709563.1 | | | 1987- | 2007 | 709564.1 | | | 2007_C1A_as | 2007 |
| | | | | 2007_G21U_s | | | | | | |
| AD- | A- | UACUAUGCCUAAACGCAUGUU | 827 | NM_002973.3_ | 1989- | A- | AACAUGCGUUUAGGCAUAGUAGA | 1102 | NM_002973.3_1987- | 1987- |
| 365918.1 | 709567.1 | | | 1989- | 2009 | 709568.1 | | | 2009_G1A_as | 2009 |
| | | | | 2009_C21U_s | | | | | | |
| AD- | A- | CUUCUGAAUCUAUGGAUCAAU | 828 | NM_002973.3_ | 2594- | A- | AUUGAUCCAUAGAUUCAGAAGUA | 1103 | NM_002973.3_2592- | 2592- |
| 366362.1 | 710455.1 | | | 2594- | 2614 | 710456.1 | | | 2614_G1A_as | 2614 |
| | | | | 2614_C21U_s | | | | | | |
| AD- | A- | UUCUGAAUCUAUGGAUCAACU | 829 | NM_002973.3_ | 2595- | A- | AGUUGATCCAUAGAUUCAGAAGU | 1104 | NM_002973.3_2593- | 2593- |
| 366363.1 | 710457.1 | | | 2595-2615_s | 2615 | 710458.1 | | | 2615_as | 2615 |
| AD- | A- | UCUGAAUCUAUGGAUCAACUA | 830 | NM_002973.3_ | 2596- | A- | UAGUUGAUCCAUAGAUUCAGAAG | 1105 | NM_002973.3_2594- | 2594- |
| 366364.1 | 710459.1 | | | 2596-2616_s | 2616 | 710460.1 | | | 2616_as | 2616 |
| AD- | A- | CUGAAUCUAUGGAUCAACUAU | 831 | NM_002973.3_ | 2597- | A- | AUAGUUGAUCCAUAGAUUCAGAA | 1106 | NM_002973.3_2595- | 2595- |
| 366365.1 | 710461.1 | | | 2597- | 2617 | 710462.1 | | | 2617_G1A_as | 2617 |
| | | | | 2617_C21U_s | | | | | | |
| AD- | A- | UGAAUCUAUGGAUCAACUACU | 832 | NM_002973.3_ | 2598- | A- | AGUAGUTGAUCCAUAGAUUCAGA | 1107 | NM_002973.3_2596- | 2596- |
| 366366.1 | 710463.1 | | | 2598-2618_s | 2618 | 710464.1 | | | 2618_as | 2618 |
| AD- | A- | GAAUCUAUGGAUCAACUACUA | 833 | NM_002973.3_ | 2599- | A- | UAGUAGTUGAUCCAUAGAUUCAG | 1108 | NM_002973.3_2597- | 2597- |
| 366367.1 | 710465.1 | | | 2599-2619_s | 2619 | 710466.1 | | | 2619_as | 2619 |
| AD- | A- | AAUCUAUGGAUCAACUACUAA | 834 | NM_002973.3_ | 2600- | A- | UUAGUAGUUGAUCCAUAGAUUCA | 1109 | NM_002973.3_2598- | 2598- |
| 366368.1 | 710467.1 | | | 2600-2620_s | 2620 | 710468.1 | | | 2620_as | 2620 |
| AD- | A- | AUCUAUGGAUCAACUACUAAA | 835 | NM_002973.3_ | 2601- | A- | UUUAGUAGUUGAUCCAUAGAUUC | 1110 | NM_002973.3_2599- | 2599- |
| 366369.1 | 710469.1 | | | 2601-2621_s | 2621 | 710470.1 | | | 2621_as | 2621 |
| AD- | A- | UAUACCCAAUACCUAUGACGU | 836 | NM_002973.3_ | 3104- | A- | ACGUCATAGGUAUUGGGUAUAAA | 1111 | NM_002973.3_3102- | 3102- |
| 366772.1 | 711275.1 | | | 3104- | 3124 | 711276.1 | | | 3124_G1A_as | 3124 |
| | | | | 3124_C21U_s | | | | | | |
| AD- | A- | GACAUAUAGAGCAGUACCAAA | 837 | NM_002973.3_ | 3147- | A- | UUUGGUACUGCUCUAUAUGUCUU | 1112 | NM_002973.3_3145- | 3145- |
| 366815.1 | 711361.1 | | | 3147-3167_s | 3167 | 711362.1 | | | 3167_as | 3167 |
| AD- | A- | AUAUAGAGCAGUACCAAAUAU | 838 | NM_002973.3_ | 3150- | A- | AUAUUUGGUACUGCUCUAUAUGU | 1113 | NM_002973.3_3148- | 3148- |
| 366818.1 | 711367.1 | | | 3150-3170_s | 3170 | 711368.1 | | | 3170_as | 3170 |
| AD- | A- | UAUAGAGCAGUACCAAAUAUU | 839 | NM_002973.3_ | 3151- | A- | AAUAUUTGGUACUGCUCUAUAUG | 1114 | NM_002973.3_3149- | 3149- |
| 366819.1 | 711369.1 | | | 3151- | 3171 | 711370.1 | | | 3171_C1A_as | 3171 |
| | | | | 3171_G21U_s | | | | | | |
| AD- | A- | AUAGAGCAGUACCAAAUAUGU | 840 | NM_002973.3_ | 3152- | A- | ACAUAUTUGGUACUGCUCUAUAU | 1115 | NM_002973.3_3150- | 3150- |
| 366820.1 | 711371.1 | | | 3152- | 3172 | 711372.1 | | | 3172_G1A_as | 3172 |
| | | | | 3172_C21U_s | | | | | | |
| AD- | A- | AGAGCAGUACCAAAUAUGCCU | 841 | NM_002973.3_ | 3154- | A- | AGGCAUAUUUGGUACUGCUCUAU | 1116 | NM_002973.3_3152- | 3152- |
| 366822.1 | 711375.1 | | | 3154- | 3174 | 711376.1 | | | 3174_G1A_as | 3174 |
| | | | | 3174_C21U_s | | | | | | |
| AD- | A- | UGUCCCAAAUUACCAUACAAU | 842 | NM_002973.3_ | 3481- | A- | AUUGUATGGUAAUUUGGGACAUG | 1117 | NM_002973.3_3479- | 3479- |
| 367069.1 | 711869.1 | | | 3481- | 3501 | 711870.1 | | | 3501_G1A_as | 3501 |
| | | | | 3501_C21U_s | | | | | | |
| AD- | A- | UCCCAAAUUACCAUACAACAA | 843 | NM_002973.3_ | 3483- | A- | UUGUUGTAUGGUAAUUUGGGACA | 1118 | NM_002973.3_3481- | 3481- |
| 367071.1 | 711873.1 | | | 3483-3503_s | 3503 | 711874.1 | | | 3503_as | 3503 |
| AD- | A- | AAGCCCUUCUUUCUACUUUGU | 844 | NM_002973.3_ | 3510- | A- | ACAAAGTAGAAAGAAGGGCUUGU | 1119 | NM_002973.3_3508- | 3508- |
| 367098.1 | 711927.1 | | | 3510- | 3530 | 711928.1 | | | 3530_G1A_as | 3530 |
| | | | | 3530_C21U_s | | | | | | |
| AD- | A- | CCCUUCUUUCUACUUUGCCAU | 845 | NM_002973.3_ | 3513- | A- | AUGGCAAAGUAGAAAGAAGGGCU | 1120 | NM_002973.3_3511- | 3511- |
| 367101.1 | 711933.1 | | | 3513-3533_s | 3533 | 711934.1 | | | 3533_as | 3533 |
| AD- | A- | CCUUCUUUCUACUUUGCCAUU | 846 | NM_002973.3_ | 3514- | A- | AAUGGCAAAGUAGAAAGAAGGGC | 1121 | NM_002973.3_3512- | 3512- |
| 367102.1 | 711935.1 | | | 3514-3534_s | 3534 | 711936.1 | | | 3534_as | 3534 |
| AD- | A- | CUUCUUUCUACUUUGCCAUUU | 847 | NM_002973.3_ | 3515- | A- | AAAUGGCAAAGUAGAAAGAAGGG | 1122 | NM_002973.3_3513- | 3513- |
| 367103.1 | 711937.1 | | | 3515-3535_s | 3535 | 711938.1 | | | 3535_as | 3535 |
| AD- | A- | UUCUUUCUACUUUGCCAUUUC | 848 | NM_002973.3_ | 3516- | A- | GAAAUGGCAAAGUAGAAAGAAGG | 1123 | NM_002973.3_3514- | 3514- |
| 367104.1 | 711939.1 | | | 3516-3536_s | 3536 | 711940.1 | | | 3536_as | 3536 |
| AD- | A- | UCUUUCUACUUUGCCAUUUCU | 849 | NM_002973.3_3 | 3517- | A- | AGAAAUGGCAAAGUAGAAAGAAG | 1124 | NM_002973.3_3515- | 3515- |
| 367105.1 | 711941.1 | | | 517- | 3537 | 711942.1 | | | 3537_G1A_as | 3537 |
| | | | | 3537_C21U_s | | | | | | |
| AD- | A- | CUUUCUACUUUGCCAUUUCCA | 850 | NM_002973.3_ | 3518- | A- | UGGAAATGGCAAAGUAGAAAGAA | 1125 | NM_002973.3_3516- | 3516- |
| 367106.1 | 711943.1 | | | 3518-3538_s | 3538 | 711944.1 | | | 3538_as | 3538 |
| AD- | A- | UUUCUACUUUGCCAUUUCCAU | 851 | NM_002973.3_ | 3519- | A- | AUGGAAAUGGCAAAGUAGAAAGA | 1126 | NM_002973.3_3517- | 3517- |
| 367107.1 | 711945.1 | | | 3519- | 3539 | 711946.1 | | | 3539_G1A_as | 3539 |
| | | | | 3539_C21U_s | | | | | | |
| AD- | A- | UUCUACUUUGCCAUUUCCACU | 852 | NM_002973.3_ | 3520- | A- | AGUGGAAAUGGCAAAGUAGAAAG | 1127 | NM_002973.3_3518- | 3518- |
| 367108.1 | 711947.1 | | | 3520- | 3540 | 711948.1 | | | 3540_C1A_as | 3540 |
| | | | | 3540_G21U_s | | | | | | |
| AD- | A- | CAUGUACAGUCAGGAAUGGUU | 853 | NM_002973.3_ | 3910- | A- | AACCAUTCCUGACUGUACAUGAG | 1128 | NM_002973.3_3908- | 3908- |
| 367438.1 | 712607.1 | | | 3910-3930_s | 3930 | 712608.1 | | | 3930_as | 3930 |
| AD- | A- | AUGUACAGUCAGGAAUGGUUU | 854 | NM_002973.3_ | 3911- | A- | AAACCATUCCUGACUGUACAUGA | 1129 | NM_002973.3_3909- | 3909- |
| 367439.1 | 712609.1 | | | 3911- | 3931 | 712610.1 | | | 3931_G1A_as | 3931 |
| | | | | 3931_C21U_s | | | | | | |
| AD- | A- | UGUACAGUCAGGAAUGGUUCU | 855 | NM_002973.3_ | 3912- | A- | AGAACCAUUCCUGACUGUACAUG | 1130 | NM_002973.3_3910- | 3910- |
| 367440.1 | 712611.1 | | | 3912- | 3932 | 712612.1 | | | 3932_G1A_as | 3932 |
| | | | | 3932_C21U_s | | | | | | |
| AD- | A- | CAGGAAUGGUUCCUUCUCAUU | 856 | NM_002973.3_ | 3920- | A- | AAUGAGAAGGAACCAUUCCUGAC | 1131 | NM_002973.3_3918- | 3918- |
| 367448.1 | 712627.1 | | | 3920- | 3940 | 712628.1 | | | 3940_G1A_as | 3940 |
| | | | | 3940_C21U_s | | | | | | |
| AD- | A- | GAAUGGUUCCUUCUCAUCCAA | 857 | NM_002973.3_ | 3923- | A- | UUGGAUGAGAAGGAACCAUUCCU | 1132 | NM_002973.3_3921- | 3921- |
| 367451.1 | 712633.1 | | | 3923-3943_s | 3943 | 712634.1 | | | 3943_as | 3943 |
| AD- | A- | AUGGUUCCUUCUCAUCCAACU | 858 | NM_002973.3_ | 3925- | A- | AGUUGGAUGAGAAGGAACCAUUC | 1133 | NM_002973.3_3923- | 3923- |
| 367453.1 | 712637.1 | | | 3925-3945_s | 3945 | 712638.1 | | | 3945_as | 3945 |
| AD- | A- | UGGUUCCUUCUCAUCCAACUU | 859 | NM_002973.3_ | 3926- | A- | AAGUUGGAUGAGAAGGAACCAUU | 1134 | NM_002973.3_3924- | 3924- |
| 367454.1 | 712639.1 | | | 3926- | 3946 | 712640.1 | | | 3946_C1A_as | 3946 |
| | | | | 3946_G21U_s | | | | | | |
| AD- | A- | GUUCCUUCUCAUCCAACUGCU | 860 | NM_002973.3_ | 3928- | A- | AGCAGUTGGAUGAGAAGGAACCA | 1135 | NM_002973.3_3926- | 3926- |
| 367456.1 | 712643.1 | | | 3928- | 3948 | 712644.1 | | | 3948_G1A_as | 3948 |
| | | | | 3948_C21U_s | | | | | | |
| AD- | A- | CAUGCGCCAAUGAUGCUAAUU | 861 | NM_002973.3_ | 3949- | A- | AAUUAGCAUCAUUGGCGCAUGGG | 1136 | NM_002973.3_3947- | 3947- |
| 367477.1 | 712685.1 | | | 3949- | 3969 | 712686.1 | | | 3969_C1A_as | 3969 |
| | | | | 3969_G21U_s | | | | | | |
| AD- | A- | GCGCCAAUGAUGCUAAUGACU | 862 | NM_002973.3_ | 3952- | A- | AGUCAUTAGCAUCAUUGGCGCAU | 1137 | NM_002973.3_3950- | 3950- |
| 367480.1 | 712691.1 | | | 3952- | 3972 | 712692.1 | | | 3972_C1A_as | 3972 |
| | | | | 3972_G21U_s | | | | | | |
| AD- | A- | GCCAAUGAUGCUAAUGACGAU | 863 | NM_002973.3_ | 3954- | A- | AUCGUCAUUAGCAUCAUUGGCGC | 1138 | NM_002973.3_3952- | 3952- |
| 367482.1 | 712695.1 | | | 3954- | 3974 | 712696.1 | | | 3974_G1A_as | 3974 |
| | | | | 3974_C21U_s | | | | | | |
| AD- | A- | CCAAUGAUGCUAAUGACGACA | 864 | NM_002973.3_ | 3955- | A- | UGUCGUCAUUAGCAUCAUUGGCG | 1139 | NM_002973.3_3953- | 3953- |
| 367483.1 | 712697.1 | | | 3955-3975_s | 3975 | 712698.1 | | | 3975_as | 3975 |
| AD- | A- | AUGAUGCUAAUGACGACACAU | 865 | NM_002973.3_ | 3958- | A- | AUGUGUCGUCAUUAGCAUCAUUG | 1140 | NM_002973.3_3956- | 3956- |
| 367486.1 | 712703.1 | | | 3958- | 3978 | 712704.1 | | | 3978_C1A_as | 3978 |
| | | | | 3978_G21U_s | | | | | | |
| AD- | A- | UGAUGCUAAUGACGACACAGU | 866 | NM_002973.3_ | 3959- | A- | ACUGUGTCGUCAUUAGCAUCAUU | 1141 | NM_002973.3_3957- | 3957- |
| 367487.1 | 712705.1 | | | 3959- | 3979 | 712706.1 | | | 3979_G1A_as | 3979 |
| | | | | 3979_C21U_s | | | | | | |
| AD- | A- | CGCUCAAAGUGCACUACAGCU | 867 | NM_002973.3_ | 4005- | A- | AGCUGUAGUGCACUUUGAGCGAG | 1142 | NM_002973.3_4003- | 4003- |
| 367513.1 | 712757.1 | | | 4005- | 4025 | 712758.1 | | | 4025_G1A_as | 4025 |
| | | | | 4025_C21U_s | | | | | | |
| AD- | A- | AGCCCAUUCCAGUCUCGACAA | 868 | NM_002973.3_ | 4022- | A- | UUGUCGAGACUGGAAUGGGCUGU | 1143 | NM_002973.3_4020- | 4020- |
| 367530.1 | 712791.1 | | | 4022-4042_s | 4042 | 712792.1 | | | 4042_as | 4042 |
| AD- | A- | CCCAUUCCAGUCUCGACAACA | 869 | NM_002973.3_ | 4024- | A- | UGUUGUCGAGACUGGAAUGGGCU | 1144 | NM_002973.3_4022- | 4022- |
| 367532.1 | 712795.1 | | | 4024-4044_s | 4044 | 712796.1 | | | 4044_as | 4044 |
| AD- | A- | CACCACCAACAGCAGUUGUAA | 870 | NM_002973.3_ | 4084- | A- | UUACAACUGCUGUUGGUGGUGGG | 1145 | NM_002973.3_4082- | 4082- |
| 367571.1 | 712873.1 | | | 4084-4104_s | 4104 | 712874.1 | | | 4104_as | 4104 |
| AD- | A- | ACCACCAACAGCAGUUGUAAU | 871 | NM_002973.3_ | 4085- | A- | AUUACAACUGCUGUUGGUGGUGG | 1146 | NM_002973.3_4083- | 4083- |
| 367572.1 | 712875.1 | | | 0485- | 4105 | 712876.1 | | | 4105_C1A_as | 4105 |
| | | | | 4105_G21U_s | | | | | | |
| AD- | A- | CCACCAACAGCAGUUGUAAGU | 872 | NM_002973.3_ | 4086- | A- | ACUUACAACUGCUGUUGGUGGUG | 1147 | NM_002973.3_4084- | 4084- |
| 367573.1 | 712877.1 | | | 4086- | 4106 | 712878.1 | | | 4106_C1A_as | 4106 |
| | | | | 4106_G21U_s | | | | | | |
| AD- | A- | ACCAACAGCAGUUGUAAGGCU | 873 | NM_002973.3_ | 4088- | A- | AGCCUUACAACUGCUGUUGGUGG | 1148 | NM_002973.3_4086- | 4086- |
| 367575.1 | 712881.1 | | | 4088-4108_s | 4108 | 712882.1 | | | 4108_as | 4108 |
| AD- | A- | CAACAGCAGUUGUAAGGCUGU | 874 | NM_002973.3_ | 4090- | A- | ACAGCCTUACAACUGCUGUUGGU | 1149 | NM_002973.3_4088- | 4088- |
| 367577.1 | 712885.1 | | | 4090- | 4110 | 712886.1 | | | 4110_G1A_as | 4110 |
| | | | | 4110_C21U_s | | | | | | |
| AD- | A- | CUUCUACUGCUUCUACCAACU | 875 | NM_002973.3_ | 4145- | A- | AGUUGGTAGAAGCAGUAGAAGGG | 1150 | NM_002973.3_4143- | 4143- |
| 367630.1 | 712991.1 | | | 4145-4165_s | 4165 | 712992.1 | | | 4165_as | 4165 |
| AD- | A- | UCUACUGCUUCUACCAACUGU | 876 | NM_002973.3_ | 4147- | A- | ACAGUUGGUAGAAGCAGUAGAAG | 1151 | NM_002973.3_4145- | 4145- |
| 367632.1 | 712995.1 | | | 4147- | 4167 | 712996.1 | | | 4167_C1A_as | 4167 |
| | | | | 4167_G21U_s | | | | | | |
| AD- | A- | CUACUGCUUCUACCAACUGGA | 877 | NM_002973.3_ | 4148- | A- | UCCAGUTGGUAGAAGCAGUAGAA | 1152 | NM_002973.3_4146- | 4146- |
| 367633.1 | 712997.1 | | | 4148-4168_s | 4168 | 712998.1 | | | 4168_as | 4168 |
| AD- | A- | CUGCUUCUACCAACUGGAAGU | 878 | NM_002973.3_ | 4151- | A- | ACUUCCAGUUGGUAGAAGCAGUA | 1153 | NM_002973.3_4149- | 4149- |
| 367636.1 | 713003.1 | | | 4151- | 4171 | 713004.1 | | | 4171_G1A_as | 4171 |
| | | | | 4171_C21U_s | | | | | | |
| AD- | A- | CAACUGGAAGCACAGAAAACU | 879 | NM_002973.3_ | 4161- | A- | AGUUUUCUGUGCUUCCAGUUGGU | 1154 | NM_002973.3_4159- | 4159- |
| 367646.1 | 713023.1 | | | 4161-4181_s | 4181 | 713024.1 | | | 4181_as | 4181 |
| AD- | A- | UUGAUUUCUUGUAACAUCCAA | 880 | NM_002973.3_ | 4217- | A- | UUGGAUGUUACAAGAAAUCAACA | 1155 | NM_002973.3_4215- | 4215- |
| 367685.1 | 713101.1 | | | 4217-4237_s | 4237 | 713102.1 | | | 4237_as | 4237 |
| AD- | A- | AUUUCUUGUAACAUCCAAUAU | 881 | NM_002973.3_ | 4220- | A- | AUAUUGGAUGUUACAAGAAAUCA | 1156 | NM_002973.3_4218- | 4218- |
| 367688.1 | 713107.1 | | | 4220- | 4240 | 713108.1 | | | 4240_C1A_as | 4240 |
| | | | | 4240_G21U_s | | | | | | |
| AD- | A- | UUCUUGUAACAUCCAAUAGGA | 882 | NM_002973.3_ | 4222- | A- | UCCUAUTGGAUGUUACAAGAAAU | 1157 | NM_002973.3_4220- | 4220- |
| 367690.1 | 713111.1 | | | 4222-4242_s | 4242 | 713112.1 | | | 4242_as | 4242 |
| AD- | A- | UCUUGUAACAUCCAAUAGGAA | 883 | NM_002973.3_ | 4223- | A- | UUCCUATUGGAUGUUACAAGAAA | 1158 | NM_002973.3_4221- | 4221- |
| 367691.1 | 713113.1 | | | 4223-4243_s | 4243 | 713114.1 | | | 4243_as | 4243 |
| AD- | A- | UGUAACAUCCAAUAGGAAUGU | 884 | NM_002973.3_ | 4226- | A- | ACAUUCCUAUUGGAUGUUACAAG | 1159 | NM_002973.3_4224- | 4224- |
| 367694.1 | 713119.1 | | | 4226- | 4246 | 713120.1 | | | 4246_G1A_as | 4246 |
| | | | | 4246_C21U_s | | | | | | |
| AD- | A- | UAACAUCCAAUAGGAAUGCUA | 885 | NM_002973.3_ | 4228- | A- | UAGCAUTCCUAUUGGAUGUUACA | 1160 | NM_002973.3_4226- | 4226- |
| 367696.1 | 713123.1 | | | 4228-4248_s | 4248 | 713124.1 | | | 4248_as | 4248 |
| AD- | A- | AACAUCCAAUAGGAAUGCUAA | 886 | NM_002973.3_ | 4229- | A- | UUAGCATUCCUAUUGGAUGUUAC | 1161 | NM_002973.3_4227- | 4227- |
| 367697.1 | 713125.1 | | | 4229-4249_s | 4249 | 713126.1 | | | 4249_as | 4249 |
| AD- | A- | ACAUCCAAUAGGAAUGCUAAU | 887 | NM_002973.3_ | 4230- | A- | AUUAGCAUUCCUAUUGGAUGUUA | 1162 | NM_002973.3_4228- | 4228- |
| 367698.1 | 713127.1 | | | 4230- | 4250 | 713128.1 | | | 4250 G1A_as | 4250 |
| | | | | 4250_C21U_s | | | | | | |
| AD- | A- | CAUCCAAUAGGAAUGCUAACA | 888 | NM_002973.3_ | 4231- | A- | UGUUAGCAUUCCUAUUGGAUGUU | 1163 | NM_002973.3_4229- | 4229- |
| 367699.1 | 713129.1 | | | 4231-4251_s | 4251 | 713130.1 | | | 4251_as | 4251 |
| AD- | A- | AAUAGGAAUGCUAACAGUUCA | 889 | NM_002973.3_ | 4236- | A- | UGAACUGUUAGCAUUCCUAUUGG | 1164 | NM_002973.3_4234- | 4234- |
| 367704.1 | 713139.1 | | | 4236-4256_s | 4256 | 713140.1 | | | 4256_as | 4256 |
| AD- | A- | AUAGGAAUGCUAACAGUUCAU | 890 | NM_002973.3_ | 4237- | A- | AUGAACTGUUAGCAUUCCUAUUG | 1165 | NM_002973.3_4235- | 4235- |
| 367705.1 | 713141.1 | | | 4237- | 4257 | 713142.1 | | | 4257_G1A_as | 4257 |
| | | | | 4257_C21U_s | | | | | | |
| AD- | A- | UAGGAAUGCUAACAGUUCACU | 891 | NM_002973.3_ | 4238- | A- | AGUGAACUGUUAGCAUUCCUAUU | 1166 | NM_002973.3_4236- | 4236- |
| 367706.1 | 713143.1 | | | 4238-4258_s | 4258 | 713144.1 | | | 4258_as | 4258 |
| AD- | A- | AGGAAUGCUAACAGUUCACUU | 892 | NM_002973.3_ | 4239- | A- | AAGUGAACUGUUAGCAUUCCUAU | 1167 | NM_002973.3_4237- | 4237- |
| 367707.1 | 713145.1 | | | 4239-4259_s | 4259 | 713146.1 | | | 4259_as | 4259 |
| AD- | A- | GGAAUGCUAACAGUUCACUUU | 893 | NM_002973.3_ | 4240- | A- | AAAGUGAACUGUUAGCAUUCCUA | 1168 | NM_002973.3_4238- | 4238- |
| 367708.1 | 713147.1 | | | 4240- | 4260 | 713148.1 | | | 4260 C1A_as | 4260 |
| | | | | 4260_G21U_s | | | | | | |
| AD- | A- | GAAUGCUAACAGUUCACUUGU | 894 | NM_002973.3_ | 4241- | A- | ACAAGUGAACUGUUAGCAUUCCU | 1169 | NM_002973.3_4239- | 4239- |
| 367709.1 | 713149.1 | | | 4241- | 4261 | 713150.1 | | | 4261_G1A_as | 4261 |
| | | | | 4261_C21U_s | | | | | | |
| AD- | A- | GCUAACAGUUCACUUGCAGUU | 895 | NM_002973.3_ | 4245- | A- | AACUGCAAGUGAACUGUUAGCAU | 1170 | NM_002973.3_4243- | 4243- |
| 367713.1 | 713157.1 | | | 4245- | 4265 | 713158.1 | | | 4265_C1A_as | 4265 |
| | | | | 4265_G21U_s | | | | | | |
| AD- | A- | CAGUUCACUUGCAGUGGAAGA | 896 | NM_002973.3_ | 4250- | A- | UCUUCCACUGCAAGUGAACUGUU | 1171 | NM_002973.3_4248- | 4248- |
| 367718.1 | 713167.1 | | | 4250-4270_s | 4270 | 713168.1 | | | 4270_as | 4270 |
| AD- | A- | GACCGAGUAGAGGCAUUUAGU | 897 | NM_002973.3_ | 4277- | A- | ACUAAATGCCUCUACUCGGUCCA | 1172 | NM_002973.3_4275- | 4275- |
| 367745.1 | 713221.1 | | | 4277- | 4297 | 713222.1 | | | 4297_C1A_as | 4297 |
| | | | | 4297_G21U_s | | | | | | |
| AD- | A- | ACCGAGUAGAGGCAUUUAGGA | 898 | NM_002973.3_ | 4278- | A- | UCCUAAAUGCCUCUACUCGGUCC | 1173 | NM_002973.3_4276- | 4276- |
| 367746.1 | 713223.1 | | | 4278-4298_s | 4298 | 713224.1 | | | 4298_as | 4298 |
| AD- | A- | GGCUAUUCCAUAAUUCCAUAU | 899 | NM_002973.3_ | 4306- | A- | AUAUGGAAUUAUGGAAUAGCCCC | 1174 | NM_002973.3_4304- | 4304- |
| 367755.1 | 713241.1 | | | 4306-4326_s | 4326 | 713242.1 | | | 4326_as | 4326 |
| AD- | A- | UGCCGAAACUGGAAGUUAUUU | 900 | NM_002973.3_ | 4363- | A- | AAAUAACUUCCAGUUUCGGCAAG | 1175 | NM_002973.3_4361- | 4361- |
| 367792.1 | 713315.1 | | | 4363-4383_s | 4383 | 713316.1 | | | 4383_as | 4383 |
| AD- | A- | CCGAAACUGGAAGUUAUUUAU | 901 | NM_002973.3_ | 4365- | A- | AUAAAUAACUUCCAGUUUCGGCA | 1176 | NM_002973.3_4363- | 4363- |
| 367794.1 | 713319.1 | | | 4365-4385_s | 4385 | 713320.1 | | | 4385_as | 4385 |
| AD- | A- | CGAAACUGGAAGUUAUUUAUU | 902 | NM_002973.3_ | 4366- | A- | AAUAAATAACUUCCAGUUUCGGC | 1177 | NM_002973.3_4364- | 4364- |
| 367795.1 | 713321.1 | | | 4366-4386_s | 4386 | 713322.1 | | | 4386_as | 4386 |
| AD- | A- | GAAACUGGAAGUUAUUUAUUU | 903 | NM_002973.3_ | 4367- | A- | AAAUAAAUAACUUCCAGUUUCGG | 1178 | NM_002973.3_4365- | 4365- |
| 367796.1 | 713323.1 | | | 4367-4387_s | 4387 | 713324.1 | | | 4387_as | 4387 |
| AD- | A- | AAACUGGAAGUUAUUUAUUUU | 904 | NM_002973.3_ | 4368- | A- | AAAAUAAAUAACUUCCAGUUUCG | 1179 | NM_002973.3_4366- | 4366- |
| 367797.1 | 713325.1 | | | 4368-4388_s | 4388 | 713326.1 | | | 4388_as | 4388 |
| AD- | A- | UAAUAACCCUUGAAAGUCAUU | 905 | NM_002973.3_ | 4390- | A- | AAUGACTUUCAAGGGUUAUUAAA | 1180 | NM_002973.3_4388- | 4388- |
| 367801.1 | 713333.1 | | | 4390- | 4410 | 713334.1 | | | 4410_C1A_as | 4410 |
| | | | | 4410_G21U_s | | | | | | |
| AD- | A- | AAUAACCCUUGAAAGUCAUGA | 906 | NM_002973.3_ | 4391- | A- | UCAUGACUUUCAAGGGUUAUUAA | 1181 | NM_002973.3_4389- | 4389- |
| 367802.1 | 713335.1 | | | 4391-4411_s | 4411 | 713336.1 | | | 4411_as | 4411 |
| AD- | A- | AACCCUUGAAAGUCAUGAACA | 907 | NM_002973.3_ | 4394- | A- | UGUUCATGACUUUCAAGGGUUAU | 1182 | NM_002973.3_4392- | 4392- |
| 367805.1 | 713341.1 | | | 4394-4414_s | 4414 | 713342.1 | | | 4414_as | 4414 |
| AD- | A- | CUUGAAAGUCAUGAACACAUU | 908 | NM_002973.3_ | 4398- | A- | AAUGUGTUCAUGACUUUCAAGGG | 1183 | NM_002973.3_4396- | 4396- |
| 367809.1 | 713349.1 | | | 4398- | 4418 | 713350.1 | | | 4418_G1A_as | 4418 |
| | | | | 4418_C21U_s | | | | | | |
| AD- | A- | AGUCAUGAACACAUCAGCUAU | 909 | NM_002973.3_ | 4404- | A- | AUAGCUGAUGUGUUCAUGACUUU | 1184 | NM_002973.3_4402- | 4402- |
| 367815.1 | 713361.1 | | | 4404- | 4424 | 713362.1 | | | 4424_C1A_as | 4424 |
| | | | | 4424_G21U_s | | | | | | |
| AD- | A- | GUCAUGAACACAUCAGCUAGU | 910 | NM_002973.3_ | 4405- | A- | ACUAGCTGAUGUGUUCAUGACUU | 1185 | NM_002973.3_4403- | 4403- |
| 367816.1 | 713363.1 | | | 4405- | 4425 | 713364.1 | | | 4425_G1A_as | 4425 |
| | | | | 4425_C21U_s | | | | | | |
| AD- | A- | UCAUGAACACAUCAGCUAGCA | 911 | NM_002973.3_ | 4406- | A- | UGCUAGCUGAUGUGUUCAUGACU | 1186 | NM_002973.3_4404- | 4404- |
| 367817.1 | 713365.1 | | | 4406-4426_s | 4426 | 713366.1 | | | 4426_as | 4426 |
| AD- | A- | CAUGAACACAUCAGCUAGCAA | 912 | NM_002973.3_ | 4407- | A- | UUGCUAGCUGAUGUGUUCAUGAC | 1187 | NM_002973.3_4405- | 4405- |
| 367818.1 | 713367.1 | | | 4407-4427_s | 4427 | 713368.1 | | | 4427_as | 4427 |
| AD- | A- | AUGAACACAUCAGCUAGCAAA | 913 | NM_002973.3_ | 4408- | A- | UUUGCUAGCUGAUGUGUUCAUGA | 1188 | NM_002973.3_4406- | 4406- |
| 367819.1 | 713369.1 | | | 4408-4428_s | 4428 | 713370.1 | | | 4428_as | 4428 |
| AD- | A- | AUGAACACAUCAGCUAGCAAA | 914 | NM_002973.3_ | 4408- | A- | UUUGCUAGCUGAUGUGUUCAUGA | 1189 | NM_002973.3_4406- | 4406- |
| 367819.2 | 713369.1 | | | 4408-4428_s | 4428 | 713370.1 | | | 4428_as | 4428 |
| AD- | A- | UGAACACAUCAGCUAGCAAAA | 915 | NM_002973.3_ | 4409- | A- | UUUUGCTAGCUGAUGUGUUCAUG | 1190 | NM_002973.3_4407- | 4407- |
| 367820.1 | 713371.1 | | | 4409-4429_s | 4429 | 713372.1 | | | 4429_as | 4429 |
| AD- | A- | GAACACAUCAGCUAGCAAAAU | 916 | NM_002973.3_ | 4410- | A- | AUUUUGCUAGCUGAUGUGUUCAU | 1191 | NM_002973.3_4408- | 4408- |
| 367821.1 | 713373.1 | | | 4410- | 4430 | 713374.1 | | | 4430_C1A_as | 4430 |
| | | | | 4430_G21U_s | | | | | | |
| AD- | A- | AACACAUCAGCUAGCAAAAGA | 917 | NM_002973.3_ | 4411- | A- | UCUUUUGCUAGCUGAUGUGUUCA | 1192 | NM_002973.3_4409- | 4409- |
| 367822.1 | 713375.1 | | | 4411-4431_s | 4431 | 713376.1 | | | 4431_as | 4431 |
| AD- | A- | CAUCAGCUAGCAAAAGAAGUA | 918 | NM_002973.3_ | 4415- | A- | UACUUCTUUUGCUAGCUGAUGUG | 1193 | NM_002973.3_4413- | 4413- |
| 367826.1 | 713383.1 | | | 4415-4435_s | 4435 | 713384.1 | | | 4435_as | 4435 |
| AD- | A- | CUAGCAAAAGAAGUAACAAGA | 919 | NM_002973.3_ | 4421- | A- | UCUUGUTACUUCUUUUGCUAGCU | 1194 | NM_002973.3_4419- | 4419- |
| 367832.1 | 713395.1 | | | 4421-4441_s | 4441 | 713396.1 | | | 4441_as | 4441 |
| AD- | A- | GUAACAAGAGUGAUUCUUGCU | 920 | NM_002973.3_ | 4433- | A- | AGCAAGAAUCACUCUUGUUACUU | 1195 | NM_002973.3_4431- | 4431- |
| 367844.1 | 713419.1 | | | 4433-4453_s | 4453 | 713420.1 | | | 4453_as | 4453 |
| AD- | A- | UAACAAGAGUGAUUCUUGCUU | 921 | NM_002973.3_ | 4434- | A- | AAGCAAGAAUCACUCUUGUUACU | 1196 | NM_002973.3_4432- | 4432- |
| 367845.1 | 713421.1 | | | 4434- | 4454 | 713422.1 | | | 4454_C1A_as | 4454 |
| | | | | 4454_G21U_s | | | | | | |
| AD- | A- | AACAAGAGUGAUUCUUGCUGU | 922 | NM_002973.3_ | 4435- | A- | ACAGCAAGAAUCACUCUUGUUAC | 1197 | NM_002973.3_4433- | 4433- |
| 367846.1 | 713423.1 | | | 4435- | 4455 | 713424.1 | | | 4455_G1A_as | 4455 |
| | | | | 4455_C21U_s | | | | | | |
| AD- | A- | AGAGUGAUUCUUGCUGCUAUU | 923 | NM_002973.3_ | 4439- | A- | AAUAGCAGCAAGAAUCACUCUUG | 1198 | NM_002973.3_4437- | 4437- |
| 367850.1 | 713431.1 | | | 4439-4459_s | 4459 | 713432.1 | | | 4459_as | 4459 |
| AD- | A- | GAGUGAUUCUUGCUGCUAUUA | 924 | NM_002973.3_ | 4440- | A- | UAAUAGCAGCAAGAAUCACUCUU | 1199 | NM_002973.3_4438- | 4438- |
| 367851.1 | 713433.1 | | | 4440-4460_s | 4460 | 713434.1 | | | 4460_as | 4460 |
| AD- | A- | GUGAUUCUUGCUGCUAUUACU | 925 | NM_002973.3_ | 4442- | A- | AGUAAUAGCAGCAAGAAUCACUC | 1200 | NM_002973.3_4440- | 4440- |
| 367853.1 | 713437.1 | | | 4442-4462_s | 4462 | 713438.1 | | | 4462_as | 4462 |
| AD- | A- | UUGGAACGCCCUUUUACUAAA | 926 | NM_002973.3_ | 4494- | A- | UUUAGUAAAAGGGCGUUCCAAGU | 1201 | NM_002973.3_4492- | 4492- |
| 367872.1 | 713475.1 | | | 4494-4514_s | 4514 | 713476.1 | | | 4514_as | 4514 |
| AD- | A- | UGGAACGCCCUUUUACUAAAU | 927 | NM_002973.3_ | 4495- | A- | AUUUAGTAAAAGGGCGUUCCAAG | 1202 | NM_002973.3_4493- | 4493- |
| 367873.1 | 713477.1 | | | 4495- | 4515 | 713478.1 | | | 4515_G1A_as | 4515 |
| | | | | 4515_C21U_s | | | | | | |
| AD- | A- | GAACGCCCUUUUACUAAACUU | 928 | NM_002973.3_ | 4497- | A- | AAGUUUAGUAAAAGGGCGUUCCA | 1203 | NM_002973.3_4495- | 4495- |
| 367875.1 | 713481.1 | | | 4497-4517_s | 4517 | 713482.1 | | | 4517_as | 4517 |
| AD- | A- | AACGCCCUUUUACUAAACUUU | 929 | NM_002973.3_ | 4498- | A- | AAAGUUTAGUAAAAGGGCGUUCC | 1204 | NM_002973.3_4496- | 4496- |
| 367876.1 | 713483.1 | | | 4498- | 4518 | 713484.1 | | | 4518_C1A_as | 4518 |
| | | | | 4518_G21U_s | | | | | | |
| AD- | A- | ACGCCCUUUUACUAAACUUGA | 930 | NM_002973.3_ | 4499- | A- | UCAAGUTUAGUAAAAGGGCGUUC | 1205 | NM_002973.3_4497- | 4497- |
| 367877.1 | 713485.1 | | | 4499-4519_s | 4519 | 713486.1 | | | 4519_as | 4519 |
| AD- | A- | CGCCCUUUUACUAAACUUGAU | 931 | NM_002973.3_ | 4500- | A- | AUCAAGTUUAGUAAAAGGGCGUU | 1206 | NM_002973.3_4498- | 4498- |
| 367878.1 | 713487.1 | | | 4500- | 4520 | 713488.1 | | | 4520_G1A_as | 4520 |
| | | | | 4520_C21U_s | | | | | | |
| AD- | A- | GUUUCAGUAAAUUCUUACCGU | 932 | NM_002973.3_ | 4524- | A- | ACGGUAAGAAUUUACUGAAACUU | 1207 | NM_002973.3_4522- | 4522- |
| 367902.1 | 713535.1 | | | 4524-4544_s | 4544 | 713536.1 | | | 4544_as | 4544 |
| AD- | A- | UUUCAGUAAAUUCUUACCGUU | 933 | NM_002973.3_ | 4525- | A- | AACGGUAAGAAUUUACUGAAACU | 1208 | NM_002973.3_4523- | 4523- |
| 367903.1 | 713537.1 | | | 4525- | 4545 | 713538.1 | | | 4545_G1A_as | 4545 |
| | | | | 4545_C21U_s | | | | | | |
| AD- | A- | UUCAGUAAAUUCUUACCGUCA | 934 | NM_002973.3_ | 4526- | A- | UGACGGTAAGAAUUUACUGAAAC | 1209 | NM_002973.3_4524- | 4524- |
| 367904.1 | 713539.1 | | | 4526-4546_s | 4546 | 713540.1 | | | 4546_as | 4546 |
| AD- | A- | UCAGUAAAUUCUUACCGUCAA | 935 | NM_002973.3_ | 4527- | A- | UUGACGGUAAGAAUUUACUGAAA | 1210 | NM_002973.3_4525- | 4525- |
| 367905.1 | 713541.1 | | | 4527-4547_s | 4547 | 713542.1 | | | 4547_as | 4547 |
| AD- | A- | CAGUAAAUUCUUACCGUCAAA | 936 | NM_002973.3_ | 4528- | A- | UUUGACGGUAAGAAUUUACUGAA | 1211 | NM_002973.3_4526- | 4526- |
| 367906.1 | 713543.1 | | | 4528-4548_s | 4548 | 713544.1 | | | 4548_as | 4548 |
| AD- | A- | AGUAAAUUCUUACCGUCAAAU | 937 | NM_002973.3_ | 4529- | A- | AUUUGACGGUAAGAAUUUACUGA | 1212 | NM_002973.3_4527- | 4527- |
| 367907.1 | 713545.1 | | | 4529- | 4549 | 713546.1 | | | 4549_G1A_as | 4549 |
| | | | | 4549_C21U_s | | | | | | |
| AD- | A- | GUAAAUUCUUACCGUCAAACU | 938 | NM_002973.3_ | 4530- | A- | AGUUUGACGGUAAGAAUUUACUG | 1213 | NM_002973.3_4528- | 4528- |
| 367908.1 | 713547.1 | | | 5430-4550_s | 4550 | 713548.1 | | | 4550_as | 4550 |
| AD- | A- | UAAAUUCUUACCGUCAAACUU | 939 | NM_002973.3_ | 4531- | A- | AAGUUUGACGGUAAGAAUUUACU | 1214 | NM_002973.3_4529- | 4529- |
| 367909.1 | 713549.1 | | | 4531- | 4551 | 713550.1 | | | 4551_C1A_as | 4551 |
| | | | | 4551_G21U_s | | | | | | |
| AD- | A- | AAAUUCUUACCGUCAAACUGA | 940 | NM_002973.3_ | 4532- | A- | UCAGUUTGACGGUAAGAAUUUAC | 1215 | NM_002973.3_4530- | 4530- |
| 367910.1 | 713551.1 | | | 5432-4552_s | 4552 | 713552.1 | | | 4552_as | 4552 |
| AD- | A- | AAUUCUUACCGUCAAACUGAU | 941 | NM_002973.3_ | 4533- | A- | AUCAGUTUGACGGUAAGAAUUUA | 1216 | NM_002973.3_4531- | 4531- |
| 367911.1 | 713553.1 | | | 4533- | 4553 | 713554.1 | | | 4553_G1A_as | 4553 |
| | | | | 4553_C21U_s | | | | | | |
| AD- | A- | AUUCUUACCGUCAAACUGACU | 942 | NM_002973.3_ | 4534- | A- | AGUCAGTUUGACGGUAAGAAUUU | 1217 | NM_002973.3_4532- | 4532- |
| 367912.1 | 713555.1 | | | 4534- | 4554 | 713556.1 | | | 4554_C1A_as | 4554 |
| | | | | 4554_G21U_s | | | | | | |
| AD- | A- | UUCUUACCGUCAAACUGACGU | 943 | NM_002973.3_ | 4535- | A- | ACGUCAGUUUGACGGUAAGAAUU | 1218 | NM_002973.3_4533- | 4533- |
| 367913.1 | 713557.1 | | | 4535- | 4555 | 713558.1 | | | 4555_C1A_as | 4555 |
| | | | | 4555_G21U_s | | | | | | |
| AD- | A- | UCUUACCGUCAAACUGACGGA | 944 | NM_002973.3_ | 4536- | A- | UCCGUCAGUUUGACGGUAAGAAU | 1219 | NM_002973.3_4534- | 4534- |
| 367914.1 | 713559.1 | | | 4536-4556_s | 4556 | 713560.1 | | | 4556_as | 4556 |
| AD- | A- | CUUACCGUCAAACUGACGGAU | 945 | NM_002973.3_ | 4537- | A- | AUCCGUCAGUUUGACGGUAAGAA | 1220 | NM_002973.3_4535- | 4535- |
| 367915.1 | 713561.1 | | | 4537-4557_s | 4557 | 713562.1 | | | 4557_as | 4557 |
| AD- | A- | UUACCGUCAAACUGACGGAUU | 946 | NM_002973.3_ | 4538- | A- | AAUCCGTCAGUUUGACGGUAAGA | 1221 | NM_002973.3_4536- | 4536- |
| 367916.1 | 713563.1 | | | 4538-4558_s | 4558 | 713564.1 | | | 4558_as | 4558 |
| AD- | A- | UACCGUCAAACUGACGGAUUA | 947 | NM_002973.3_ | 4539- | A- | UAAUCCGUCAGUUUGACGGUAAG | 1222 | NM_002973.3_4537- | 4537- |
| 367917.1 | 713565.1 | | | 4539-4559_s | 4559 | 713566.1 | | | 4559_as | 4559 |
| AD- | A- | ACCGUCAAACUGACGGAUUAU | 948 | NM_002973.3_ | 4540- | A- | AUAAUCCGUCAGUUUGACGGUAA | 1223 | NM_002973.3_4538- | 4538- |
| 367918.1 | 713567.1 | | | 4540-4560_s | 4560 | 713568.1 | | | 4560_as | 4560 |
| AD- | A- | AACUGACGGAUUAUUAUUUAU | 949 | NM_002973.3_ | 4547- | A- | AUAAAUAAUAAUCCGUCAGUUUG | 1224 | NM_002973.3_4545- | 4545- |
| 367925.1 | 713581.1 | | | 4547-4567_s | 4567 | 713582.1 | | | 4567_as | 4567 |
| AD- | A- | AGUUUGAUGAGGUGAUCACUU | 950 | NM_002973.3_ | 4574- | A- | AAGUGATCACCUCAUCAAACUUG | 1225 | NM_002973.3_4572- | 4572- |
| 367950.1 | 713631.1 | | | 4574- | 4594 | 713632.1 | | | 4594_C1A_as | 4594 |
| | | | | 4594_G21U_s | | | | | | |
| AD- | A- | ACUGUCUACAGUGGUUCAACU | 951 | NM_002973.3_ | 4591- | A- | AGUUGAACCACUGUAGACAGUGA | 1226 | NM_002973.3_4589- | 4589- |
| 367967.1 | 713665.1 | | | 4591-4611_s | 4611 | 713666.1 | | | 4611_as | 4611 |
| AD- | A- | CUGUCUACAGUGGUUCAACUU | 952 | NM_002973.3_ | 4592- | A- | AAGUUGAACCACUGUAGACAGUG | 1227 | NM_002973.3_4590- | 4590- |
| 367968.1 | 713667.1 | | | 4592-4612_s | 4612 | 713668.1 | | | 4612_as | 4612 |
| AD- | A- | CUACAGUGGUUCAACUUUUAA | 953 | NM_002973.3_ | 4596- | A- | UUAAAAGUUGAACCACUGUAGAC | 1228 | NM_002973.3_4594- | 4594- |
| 367972.1 | 713675.1 | | | 4596-4616_s | 4616 | 713676.1 | | | 4616_as | 4616 |
| AD- | A- | UACAGUGGUUCAACUUUUAAU | 954 | NM_002973.3_ | 4597- | A- | AUUAAAAGUUGAACCACUGUAGA | 1229 | NM_002973.3_4595- | 4595- |
| 367973.1 | 713677.1 | | | 4597- | 4617 | 713678.1 | | | 4617_C1A_as | 4617 |
| | | | | 4617_G21U_s | | | | | | |
| AD- | A- | UCAACUUUUAAGUUAAGGGAA | 955 | NM_002973.3_ | 4606- | A- | UUCCCUTAACUUAAAAGUUGAAC | 1230 | NM_002973.3_4604- | 4604- |
| 367982.1 | 713695.1 | | | 4606-4626_s | 4626 | 713696.1 | | | 4626_as | 4626 |
| AD- | A- | AACUUUUAAGUUAAGGGAAAA | 956 | NM_002973.3_ | 4608- | A- | UUUUCCCUUAACUUAAAAGUUGA | 1231 | NM_002973.3_4606- | 4606- |
| 367984.1 | 713699.1 | | | 4608-4628_s | 4628 | 713700.1 | | | 4628_as | 4628 |
| AD- | A- | AAAAACUUUUACUUUGUAGAU | 957 | NM_002973.3_ | 4625- | A- | AUCUACAAAGUAAAAGUUUUUCC | 1232 | NM_002973.3_4623- | 4623- |
| 368001.1 | 713733.1 | | | 4625-4645_s | 4645 | 713734.1 | | | 4645_as | 4645 |
| AD- | A- | CCUCAGCCUACGAUUUCUUUU | 958 | NM_009125.2_ | 694- | A- | AAAAGAAAUCGUAGGCUGAGGCA | 1233 | NM_009125.2_692- | 692- |
| 385489.1 | 748537.1 | | | 694-714_s | 714 | 748538.1 | | | 714_as | 714 |
| AD- | A- | CUCAGCCUACGAUUUCUUUUG | 959 | NM_009125.2_ | 695- | A- | CAAAAGAAAUCGUAGGCUGAGGC | 1234 | NM_009125.2_693- | 693- |
| 385490.1 | 748539.1 | | | 695-715_s | 715 | 748540.1 | | | 715_as | 715 |
| AD- | A- | UCAGCCUACGAUUUCUUUUGA | 960 | NM_009125.2_ | 696- | A- | UCAAAAGAAAUCGUAGGCUGAGG | 1235 | NM_009125.2_694- | 694- |
| 385491.1 | 748541.1 | | | 696-716_s | 716 | 748542.1 | | | 716_as | 716 |
| AD- | A- | GAGGAUGGUUCAUAUACUUAU | 961 | NM_002973.3_ | 960- | A- | AUAAGUAUAUGAACCAUCCUCAC | 1236 | NM_009125.2_733- | |
| 385513.1 | 707765.1 | | | 960-980_C21U_s | 980 | 748584.1 | | | 755_G1A_as | |
| AD- | A- | AAUGUGAAGUACAAGUGAAAA | 962 | NM_002973.3_ | 998- | A- | UUUUCACUUGUACUUCACAUUUC | 1237 | NM_009125.2_771- | |
| 385515.1 | 707841.1 | | | 998-1018_s | 1018 | 748586.1 | | | 793_as | |
| AD- | A- | AGGAUGGUUCAUAUACUUACU | 963 | NM_009125.2_ | 736- | A- | AGUAAGTAUAUGAACCAUCCUCA | 1238 | NM_009125.2_734- | 734- |
| 385521.1 | 748597.1 | | | 736-756_G21U_s | 756 | 748598.1 | | | 756_C1A_as | 756 |
| AD- | A- | GUGAAGUACAAGUGAAAAACU | 964 | NM_009125.2_ | 776- | A- | AGUUUUTCACUUGUACUUCACAU | 1239 | NM_009125.2_774- | 774- |
| 385557.1 | 748669.1 | | | 776-796_G21U_s | 796 | 748670.1 | | | 796_C1A_as | 796 |
| AD- | A- | AAGGAGUUUUUAAAACAUACA | 965 | NM_009125.2_ | 809- | A- | UGUAUGTUUUAAAAACUCCUUCA | 1240 | NM_009125.2_807- | 807- |
| 385589.1 | 748731.1 | | | 809-829_s | 829 | 748732.1 | | | 829_as | 829 |
| AD- | A- | AGGAGUUUUUAAAACAUACAU | 966 | NM_009125.2_ | 810- | A- | AUGUAUGUUUUAAAAACUCCUUC | 1241 | NM_009125.2_808- | 808- |
| 385590.1 | 748733.1 | | | 810-830_G21U_s | 830 | 748734.1 | | | 830_C1A_as | 830 |
| AD- | A- | AAACAUACAGUCCUAAGUGUU | 967 | NM_009125.2_ | 821- | A- | AACACUTAGGACUGUAUGUUUUA | 1242 | NM_009125.2_819- | 819- |
| 385601.1 | 748755.1 | | | 821-841_G21U_s | 841 | 748756.1 | | | 841_C1A_as | 841 |
| AD- | A- | AACAUACAGUCCUAAGUGUGA | 968 | NM_009125.2_ | 822- | A- | UCACACTUAGGACUGUAUGUUUU | 1243 | NM_009125.2_820- | 820- |
| 385602.1 | 748757.1 | | | 822-842_s | 842 | 748758.1 | | | 842_as | 842 |
| AD- | A- | ACAUACAGUCCUAAGUGUGAU | 969 | NM_009125.2_ | 823- | A- | AUCACACUUAGGACUGUAUGUUU | 1244 | NM_009125.2_821- | 821- |
| 385603.1 | 748759.1 | | | 823-843_C21U_s | 843 | 748760.1 | | | 843_G1A_as | 843 |
| AD- | A- | GCUGCACAUGAGAAAAGUACA | 970 | NM_009125.2_ | 856- | A- | UGUACUTUUCUCAUGUGCAGCAU | 1245 | NM_009125.2_854- | 854- |
| 385640.1 | 748829.1 | | | 856-876_s | 876 | 748830.1 | | | 876_as | 876 |
| AD- | A- | CUGCACAUGAGAAAAGUACAU | 971 | NM_009125.2_ | 857- | A- | AUGUACTUUUCUCAUGUGCAGCA | 1246 | NM_009125.2_855- | 855- |
| 385641.1 | 748831.1 | | | 857-877_G21U_s | 877 | 748832.1 | | | 877_C1A_as | 877 |
| AD- | A- | AUGGAGAGUGUUUUGUUCAAA | 972 | NM_009125.2_ | 910- | A- | UUUGAACAAAACACUCUCCAUUA | 1247 | NM_009125.2_908- | 908- |
| 385660.1 | 748869.1 | | | 910-930_s | 930 | 748870.1 | | | 930_as | 930 |
| AD- | A- | GGAGAGUGUUUUGUUCAAAUU | 973 | NM_009125.2_ | 912- | A- | AAUUUGAACAAAACACUCUCCAU | 1248 | NM_009125.2_910- | 910- |
| 385662.1 | 748873.1 | | | 912-932_G21U_s | 932 | 748874.1 | | | 932_C1A_as | 932 |
| AD- | A- | UUUGUUCAAAUGCUCAGACUU | 974 | NM_009125.2_ | 921- | A- | AAGUCUGAGCAUUUGAACAAAAC | 1249 | NM_009125.2_919- | 919- |
| 385671.1 | 748891.1 | | | 921-941_s | 941 | 748892.1 | | | 941_as | 941 |
| AD- | A- | UGUUCAAAUGCUCAGACUUCU | 975 | NM_009125.2_ | 923- | A- | AGAAGUCUGAGCAUUUGAACAAA | 1250 | NM_009125.2_921- | 921- |
| 385675.1 | 748897.1 | | | 923-943_G21U_s | 943 | 748898.1 | | | 943_C1A_as | 943 |
| AD- | A- | GUUCAAAUGCUCAGACUUCGU | 976 | NM_009125.2_ | 924- | A- | ACGAAGTCUGAGCAUUUGAACAA | 1251 | NM_009125.2_922- | 922- |
| 385676.1 | 748899.1 | | | 924-944_s | 944 | 748900.1 | | | 944_as | 944 |
| AD- | A- | UUCAAAUGCUCAGACUUCGUU | 977 | NM_009125.2_ | 925- | A- | AACGAAGUCUGAGCAUUUGAACA | 1252 | NM_009125.2_923- | 923- |
| 385677.1 | 748901.1 | | | 925-945_s | 945 | 748902.1 | | | 945_as | 945 |
| AD- | A- | UCAAAUGCUCAGACUUCGUUU | 978 | NM_009125.2_ | 926- | A- | AAACGAAGUCUGAGCAUUUGAAC | 1253 | NM_009125.2_924- | 924- |
| 385678.1 | 748903.1 | | | 926-946_G21U_s | 946 | 748904.1 | | | 946_C1A_as | 946 |
| AD- | A- | CAAAUGCUCAGACUUCGUUGU | 979 | NM_009125.2_ | 927- | A- | ACAACGAAGUCUGAGCAUUUGAA | 1254 | NM_009125.2_925- | 925- |
| 385679.1 | 748905.1 | | | 927-947_s | 947 | 748906.1 | | | 947_as | 947 |
| AD- | A- | AAAUGCUCAGACUUCGUUGUU | 980 | NM_009125.2_ | 928- | A- | AACAACGAAGUCUGAGCAUUUGA | 1255 | NM_009125.2_926- | 926- |
| 385680.1 | 748907.1 | | | 928-948_G21U_s | 948 | 748908.1 | | | 948_C1A_as | 948 |
| AD- | A- | AAUGCUCAGACUUCGUUGUGU | 981 | NM_009125.2_ | 929- | A- | ACACAACGAAGUCUGAGCAUUUG | 1256 | NM_009125.2_927- | 927- |
| 385681.1 | 748909.1 | | | 929-949_G21U_s | 949 | 748910.1 | | | 949_C1A_as | 949 |
| AD- | A- | ACAUGUUUCGAUAUAAUGAAU | 982 | NM_009125.2_ | 1133- | A- | AUUCAUTAUAUCGAAACAUGUCA | 1257 | NM_009125.2_1131- | 1131- |
| 385834.1 | 749211.1 | | | 1133- | 1153 | 749212.1 | | | 1153_C1A_as | 1153 |
| | | | | 1153_G21U_s | | | | | | |
| AD- | A- | UUUAUCUUCAUAUACGGUUCU | 983 | NM_009125.2_ | 1188- | A- | AGAACCGUAUAUGAAGAUAAACU | 1258 | NM_009125.2_1186- | 1186- |
| 385889.1 | 749321.1 | | | 1188- | 1208 | 749322.1 | | | 1208_G1A_as | 1208 |
| | | | | 1208_C21U_s | | | | | | |
| AD- | A- | AGGGACAACUCAGAAGAAUUU | 984 | NM_009125.2_ | 1216- | A- | AAAUUCTUCUGAGUUGUCCCUUU | 1259 | NM_009125.2_1214- | 1214- |
| 385917.1 | 749377.1 | | | 1216-1236_s | 1236 | 749378.1 | | | 1236_as | 1236 |
| AD- | A- | GGGACAACUCAGAAGAAUUUC | 985 | NM_009125.2_ | 1217- | A- | GAAAUUCUUCUGAGUUGUCCCUU | 1260 | NM_009125.2_1215- | 1215- |
| 385918.1 | 749379.1 | | | 1217-1237_s | 1237 | 749380.1 | | | 1237_as | 1237 |
| AD- | A- | GGACAACUCAGAAGAAUUUCU | 986 | NM_009125.2_ | 1218- | A- | AGAAAUTCUUCUGAGUUGUCCCU | 1261 | NM_009125.2_1216- | 1216- |
| 385919.1 | 749381.1 | | | 1218-1238_s | 1238 | 749382.1 | | | 1238_as | 1238 |
| AD- | A- | GACAACUCAGAAGAAUUUCUU | 987 | NM_009125.2_ | 1219- | A- | AAGAAATUCUUCUGAGUUGUCCC | 1262 | NM_009125.2_1217- | 1217- |
| 385920.1 | 749383.1 | | | 1219-1239_s | 1239 | 749384.1 | | | 1239_as | 1239 |
| AD- | A- | CUUCUCACACUUCAGAUUUCA | 988 | NM_002973.3_ | 1748- | A- | UGAAAUCUGAAGUGUGAGAAGCA | 1263 | NM_009125.2_1518- | |
| 386134.1 | 709229.1 | | | 1748-1768_s | 1768 | 749805.1 | | | 1540_as | |
| AD- | A- | UUCUCACACUUCAGAUUUCAA | 989 | NM_002973.3_ | 1749- | A- | UUGAAATCUGAAGUGUGAGAAGC | 1264 | NM_009125.2_1519- | |
| 386135.1 | 709231.1 | | | 1749-1769_s | 1769 | 749806.1 | | | 1541_as | |
| AD- | A- | UCAGACCAAAGAGUAGUUAAU | 990 | NM_002973.3_ | 1783- | A- | AUUAACTACUCUUUGGUCUGAGC | 1265 | NM_009125.2_1553- | |
| 386136.1 | 709299.1 | | | 1783-1803_s | 1803 | 749807.1 | | | 1575_as | |
| AD- | A- | CAGACCAAAGAGUAGUUAAUU | 991 | NM_002973.3_ | 1784- | A- | AAUUAACUACUCUUUGGUCUGAG | 1266 | NM_009125.2_1554- | |
| 386137.1 | 709301.1 | | | 1784- | 1804 | 749808.1 | | | 1576_C1A_as | |
| | | | | 1804_G21U_s | | | | | | |
| AD- | A- | UGCUUCUCACACUUCAGAUUU | 992 | NM_009125.2_ | 1518- | A- | AAAUCUGAAGUGUGAGAAGCAGC | 1267 | NM_009125.2_1516- | 1516- |
| 386149.1 | 749831.1 | | | 1518-1538_s | 1538 | 749832.1 | | | 1538_as | 1538 |
| AD- | A- | GCUUCUCACACUUCAGAUUUC | 993 | NM_009125.2_ | 1519- | A- | GAAAUCTGAAGUGUGAGAAGCAG | 1268 | NM_009125.2_1517- | 1517- |
| 386150.1 | 749833.1 | | | 1519-1539_s | 1539 | 749834.1 | | | 1539_as | 1539 |
| AD- | A- | UAGAAUUUGUAUCCCACAAUU | 994 | NM_009125.2_ | 1874- | A- | AAUUGUGGGAUACAAAUUCUAGG | 1269 | NM_009125.2_1872- | 1872- |
| 386254.1 | 750039.1 | | | 1874- | 1894 | 750040.1 | | | 1894_G1A_as | 1894 |
| | | | | 1894_C21U_s | | | | | | |
| AD- | A- | AGAAUUUGUAUCCCACAAUCU | 995 | NM_009125.2_ | 1875- | A- | AGAUUGTGGGAUACAAAUUCUAG | 1270 | NM_009125.2_1873- | 1873- |
| 386255.1 | 750041.1 | | | 1875- | 1895 | 750042.1 | | | 1895_G1A_as | 1895 |
| | | | | 1895_C21U_s | | | | | | |
| AD- | A- | GAAUUUGUAUCCCACAAUCCU | 996 | NM_009125.2_ | 1876- | A- | AGGAUUGUGGGAUACAAAUUCUA | 1271 | NM_009125.2_1874- | 1874- |
| 386256.1 | 750043.1 | | | 1876- | 1896 | 750044.1 | | | 1896_G1A_as | 1896 |
| | | | | 1896_C21U_s | | | | | | |
| AD- | A- | GUGAAACAUCACCUAGCUUUU | 997 | NM_009125.2_ | 2240- | A- | AAAAGCTAGGUGAUGUUUCACUU | 1272 | NM_009125.2_2238- | 2238- |
| 386498.1 | 750524.1 | | | 2240-2260_s | 2260 | 750525.1 | | | 2260_as | 2260 |
| AD- | A- | UGAAACAUCACCUAGCUUUUC | 998 | NM_009125.2_ | 2241- | A- | GAAAAGCUAGGUGAUGUUUCACU | 1273 | NM_009125.2_2239- | 2239- |
| 386499.1 | 750526.1 | | | 2241-2261_s | 2261 | 750527.1 | | | 2261_as | 2261 |
| AD- | A- | GAAACAUCACCUAGCUUUUCA | 999 | NM_009125.2_ | 2242- | A- | UGAAAAGCUAGGUGAUGUUUCAC | 1274 | NM_009125.2_2240- | 2240- |
| 386500.1 | 750528.1 | | | 2242-2262_s | 2262 | 750529.1 | | | 2262_as | 2262 |
| AD- | A- | AAACAUCACCUAGCUUUUCAA | 1000 | NM_009125.2_ | 2243- | A- | UUGAAAAGCUAGGUGAUGUUUCA | 1275 | NM_009125.2_2241- | 2241- |
| 386501.1 | 750530.1 | | | 2243-2263_s | 2263 | 750531.1 | | | 2263_as | 2263 |
| AD- | A- | AACAUCACCUAGCUUUUCAAA | 1001 | NM_009125.2_ | 2244- | A- | UUUGAAAAGCUAGGUGAUGUUUC | 1276 | NM_009125.2_2242- | 2242- |
| 386502.1 | 750532.1 | | | 2244-2264_s | 2264 | 750533.1 | | | 2264_as | 2264 |
| AD- | A- | ACAUCACCUAGCUUUUCAAAA | 1002 | NM_009125.2_ | 2245- | A- | UUUUGAAAAGCUAGGUGAUGUUU | 1277 | NM_009125.2_2243- | 2243- |
| 386503.1 | 750534.1 | | | 2245-2265_s | 2265 | 750535.1 | | | 2265_as | 2265 |
| AD- | A- | CAUCACCUAGCUUUUCAAAAU | 1003 | NM_009125.2_ | 2246- | A- | AUUUUGAAAAGCUAGGUGAUGUU | 1278 | NM_009125.2_2244- | 2244- |
| 386504.1 | 750536.1 | | | 2246- | 2266 | 750537.1 | | | 2266_C1A_as | 2266 |
| | | | | 2266_G21U_s | | | | | | |
| AD- | A- | AUCACCUAGCUUUUCAAAAGU | 1004 | NM_009125.2_ | 2247- | A- | ACUUUUGAAAAGCUAGGUGAUGU | 1279 | NM_009125.2_2245- | 2245- |
| 386505.1 | 750538.1 | | | 2247- | 2267 | 750539.1 | | | 2267_G1A_as | 2267 |
| | | | | 2267_C21U_s | | | | | | |
| AD- | A- | UCACCUAGCUUUUCAAAAGCU | 1005 | NM_009125.2_ | 2248- | A- | AGCUUUTGAAAAGCUAGGUGAUG | 1280 | NM_009125.2_2246- | 2246- |
| 386506.1 | 750540.1 | | | 2248-2268_s | 2268 | 750541.1 | | | 2268_as | 2268 |
| AD- | A- | CACCUAGCUUUUCAAAAGCUU | 1006 | NM_009125.2_ | 2249- | A- | AAGCUUTUGAAAAGCUAGGUGAU | 1281 | NM_009125.2_2247- | 2247- |
| 386507.1 | 750542.1 | | | 2249- | 2269 | 750543.1 | | | 2269_C1A_as | 2269 |
| | | | | 2269_G21U_s | | | | | | |
| AD- | A- | ACCUAGCUUUUCAAAAGCUGA | 1007 | NM_009125.2_ | 2250- | A- | UCAGCUTUUGAAAAGCUAGGUGA | 1282 | NM_009125.2_2248- | 2248- |
| 386508.1 | 750544.1 | | | 2250-2270_s | 2270 | 750545.1 | | | 2270_as | 2270 |
| AD- | A- | CCUAGCUUUUCAAAAGCUGAU | 1008 | NM_009125.2_ | 2251- | A- | AUCAGCTUUUGAAAAGCUAGGUG | 1283 | NM_009125.2_2249- | 2249- |
| 386509.1 | 750546.1 | | | 2251- | 2271 | 750547.1 | | | 2271_G1A_as | 2271 |
| | | | | 2271_C21U_s | | | | | | |
| AD- | A- | UCUGAAUCUAUGGAUCAACUA | 1009 | NM_002973.3_ | 2596- | A- | UAGUUGAUCCAUAGAUUCAGAUG | 1284 | NM_009125.2_2366- | |
| 386595.1 | 710459.1 | | | 2596-2616_s | 2616 | 750716.1 | | | 2388_as | |
| AD- | A- | CUGAAUCUAUGGAUCAACUAU | 1010 | NM_002973.3_ | 2597- | A- | AUAGUUGAUCCAUAGAUUCAGAU | 1285 | NM_009125.2_2367- | |
| 386596.1 | 710461.1 | | | 2597- | 2617 | 750717.1 | | | 2389_G1A_as | |
| | | | | 2617_C21U_s | | | | | | |
| AD- | A- | CAUCUGAAUCUAUGGAUCAAU | 1011 | NM_009125.2_ | 2366- | A- | AUUGAUCCAUAGAUUCAGAUGUA | 1286 | NM_009125.2_2364- | 2364- |
| 386617.1 | 750758.1 | | | 2366- | 2386 | 750759.1 | | | 2386_G1A_as | 2386 |
| | | | | 2386_C21U_s | | | | | | |
| AD- | A- | AUCUGAAUCUAUGGAUCAACU | 1012 | NM_009125.2_ | 2367- | A- | AGUUGATCCAUAGAUUCAGAUGU | 1287 | NM_009125.2_2365- | 2365- |
| 386618.1 | 750760.1 | | | 2367-2387_s | 2387 | 750761.1 | | | 2387_as | 2387 |
| AD- | A- | AUCUAUGGAUCAACUACUAAU | 1013 | NM_009125.2_ | 2373- | A- | AUUAGUAGUUGAUCCAUAGAUUC | 1288 | NM_009125.2_2371- | 2371- |
| 386619.1 | 750762.1 | | | 2373- | 2393 | 750763.1 | | | 2393_C1A_as | 2393 |
| | | | | 2393_G21U_s | | | | | | |
| AD- | A- | UCUAUGGAUCAACUACUAAGU | 1014 | NM_009125.2_ | 2374- | A- | ACUUAGTAGUUGAUCCAUAGAUU | 1289 | NM_009125.2_2372- | 2372- |
| 386620.1 | 750764.1 | | | 2374- | 2394 | 750765.1 | | | 2394_G1A_as | 2394 |
| | | | | 2394_C21U_s | | | | | | |
| AD- | A- | CUAUGGAUCAACUACUAAGCA | 1015 | NM_009125.2_ | 2375- | A- | UGCUUAGUAGUUGAUCCAUAGAU | 1290 | NM_009125.2_2373- | 2373- |
| 386621.1 | 750766.1 | | | 2375-2395_s | 2395 | 750767.1 | | | 2395_as | 2395 |
| AD- | A- | UAUGGAUCAACUACUAAGCAA | 1016 | NM_009125.2_ | 2376- | A- | UUGCUUAGUAGUUGAUCCAUAGA | 1291 | NM_009125.2_2374- | 2374- |
| 386622.1 | 750768.1 | | | 2376-2396_s | 2396 | 750769.1 | | | 2396_as | 2396 |
| AD- | A- | AUGGAUCAACUACUAAGCAAA | 1017 | NM_009125.2_ | 2377- | A- | UUUGCUTAGUAGUUGAUCCAUAG | 1292 | NM_009125.2_2375- | 2375- |
| 386623.1 | 750770.1 | | | 2377-2397_s | 2397 | 750771.1 | | | 2397_as | 2397 |
| AD- | A- | UGGAUCAACUACUAAGCAAAA | 1018 | NM_009125.2_ | 2378- | A- | UUUUGCTUAGUAGUUGAUCCAUA | 1293 | NM_009125.2_2376- | 2376- |
| 386624.1 | 750772.1 | | | 2378-2398_s | 2398 | 750773.1 | | | 2398_as | 2398 |
| AD- | A- | GGAUCAACUACUAAGCAAAAA | 1019 | NM_009125.2_ | 2379- | A- | UUUUUGCUUAGUAGUUGAUCCAU | 1294 | NM_009125.2_2377- | 2377- |
| 386625.1 | 750774.1 | | | 2379-2399_s | 2399 | 750775.1 | | | 2399_as | 2399 |
| AD- | A- | GAUCAACUACUAAGCAAAAAU | 1020 | NM_009125.2_ | 2380- | A- | AUUUUUGCUUAGUAGUUGAUCCA | 1295 | NM_009125.2_2378- | 2378- |
| 386626.1 | 750776.1 | | | 2380-2400_s | 2400 | 750777.1 | | | 2400_as | 2400 |
| AD- | A- | AAGGAGAAAAGUCACGAGAUU | 1021 | NM_009125.2_ | 2405- | A- | AAUCUCGUGACUUUUCUCCUUCU | 1296 | NM_009125.2_2403- | 2403- |
| 386647.1 | 750818.1 | | | 2405-2425_s | 2425 | 750819.1 | | | 2425_as | 2425 |
| AD- | A- | GGAGUUCAACCCUCGUUCUUU | 1022 | NM_009125.2_ | 2697- | A- | AAAGAACGAGGGUUGAACUCCUU | 1297 | NM_009125.2_2695- | 2695- |
| 386848.1 | 751213.1 | | | 2697-2717_s | 2717 | 751214.1 | | | 2717_as | 2717 |
| AD- | A- | GUUCAACCCUCGUUCUUUCUU | 1023 | NM_009125.2_ | 2700- | A- | AAGAAAGAACGAGGGUUGAACUC | 1298 | NM_009125.2_2698- | 2698- |
| 386851.1 | 751219.1 | | | 2700- | 2720 | 751220.1 | | | 2720_G1A_as | 2720 |
| | | | | 2720_C21U_s | | | | | | |
| AD- | A- | UUCAACCCUCGUUCUUUCUCU | 1024 | NM_009125.2_ | 2701- | A- | AGAGAAAGAACGAGGGUUGAACU | 1299 | NM_009125.2_2699- | 2699- |
| 386852.1 | 751221.1 | | | 2701-2721_s | 2721 | 751222.1 | | | 2721_as | 2721 |
| AD- | A- | UCAACCCUCGUUCUUUCUCUU | 1025 | NM_009125.2_ | 2702- | A- | AAGAGAAAGAACGAGGGUUGAAC | 1300 | NM_009125.2_2700- | 2700- |
| 386853.1 | 751223.1 | | | 2702- | 2722 | 751224.1 | | | 2722_G1A_as | 2722 |
| | | | | 2722_C21U_s | | | | | | |
| AD- | A- | CAACCCUCGUUCUUUCUCUCA | 1026 | NM_009125.2_ | 2703- | A- | UGAGAGAAAGAACGAGGGUUGAA | 1301 | NM_009125.2_2701- | 2701- |
| 386860.1 | 751231.1 | | | 2703-2723_s | 2723 | 751232.1 | | | 2723_as | 2723 |
| AD- | A- | AACCCUCGUUCUUUCUCUCAU | 1027 | NM_009125.2_ | 2704- | A- | AUGAGAGAAAGAACGAGGGUUGA | 1302 | NM_009125.2_2702- | 2702- |
| 386861.1 | 751233.1 | | | 2704- | 2724 | 751234.1 | | | 2724_C1A_as | 2724 |
| | | | | 2724_G21U_s | | | | | | |
| AD- | A- | CGUUCUUUCUCUCAGCCAAAU | 1028 | NM_009125.2_ | 2710- | A- | AUUUGGCUGAGAGAAAGAACGAG | 1303 | NM_009125.2_2708- | 2708- |
| 386867.1 | 751245.1 | | | 2710- | 2730 | 751246.1 | | | 2730_C1A_as | 2730 |
| | | | | 2730_G21U_s | | | | | | |
| AD- | A- | GUUCUUUCUCUCAGCCAAAGU | 1029 | NM_009125.2_ | 2711- | A- | ACUUUGGCUGAGAGAAAGAACGA | 1304 | NM_009125.2_2709- | 2709- |
| 386868.1 | 751247.1 | | | 2711- | 2731 | 751248.1 | | | 2731_G1A_as | 2731 |
| | | | | 2731_C21U_s | | | | | | |
| AD- | A- | AGUCCUGUCAUACAAGGUAAU | 1030 | NM_009125.2_ | 3145- | A- | AUUACCTUGUAUGACAGGACUGU | 1305 | NM_009125.2_3143- | 3143- |
| 387208.1 | 751921.1 | | | 3145-3165_s | 3165 | 751922.1 | | | 3165_as | 3165 |
| AD- | A- | GUCCUGUCAUACAAGGUAAUU | 1031 | NM_009125.2_ | 3146- | A- | AAUUACCUUGUAUGACAGGACUG | 1306 | NM_009125.2_3144- | 3144- |
| 387209.1 | 751923.1 | | | 3146- | 3166 | 751924.1 | | | 3166_C1A_as | 3166 |
| | | | | 3166_G21U_s | | | | | | |
| AD- | A- | UGUCAUACAAGGUAAUGCCAU | 1032 | NM_009125.2_ | 3150- | A- | AUGGCATUACCUUGUAUGACAGG | 1307 | NM_009125.2_3148- | 3148- |
| 387213.1 | 751931.1 | | | 3150- | 3170 | 751932.1 | | | 3170_C1A_as | 3170 |
| | | | | 3170_G21U_s | | | | | | |
| AD- | A- | GUCAUACAAGGUAAUGCCAGU | 1033 | NM_009125.2_ | 3151- | A- | ACUGGCAUUACCUUGUAUGACAG | 1308 | NM_009125.2_3149- | 3149- |
| 387214.1 | 751933.1 | | | 3151- | 3171 | 751934.1 | | | 3171_C1A_as | 3171 |
| | | | | 3171_G21U_s | | | | | | |
| AD- | A- | UCUACUUUGCCAUUUCCACCU | 1034 | NM_009125.2_ | 3305- | A- | AGGUGGAAAUGGCAAAGUAGAAA | 1309 | NM_009125.2_3303- | 3303- |
| 387303.1 | 752109.1 | | | 3305- | 3325 | 752110.1 | | | 3325_C1A_as | 3325 |
| | | | | 3325_G21U_s | | | | | | |
| AD- | A- | AAGCACAGAAAACUAGAACUU | 1035 | NM_009125.2_ | 3952- | A- | AAGUUCTAGUUUUCUGUGCUUCC | 1310 | NM_009125.2_3950- | 3950- |
| 387636.1 | 752766.1 | | | 3952-3972_s | 3972 | 752767.1 | | | 3972_as | 3972 |
| AD- | A- | GCACAGAAAACUAGAACUUCA | 1036 | NM_009125.2_ | 3954- | A- | UGAAGUTCUAGUUUUCUGUGCUU | 1311 | NM_009125.2_3952- | 3952- |
| 387638.1 | 752770.1 | | | 3954-3974_s | 3974 | 752771.1 | | | 3974_as | 3974 |
| AD- | A- | ACAGAAAACUAGAACUUCAUU | 1037 | NM_009125.2_ | 3956- | A- | AAUGAAGUUCUAGUUUUCUGUGC | 1312 | NM_009125.2_3954- | 3954- |
| 387640.1 | 752774.1 | | | 3956-3976_s | 3976 | 752775.1 | | | 3976_as | 3976 |
| AD- | A- | CAGAAAACUAGAACUUCAUUU | 1038 | NM_009125.2_ | 3957- | A- | AAAUGAAGUUCUAGUUUUCUGUG | 1313 | NM_009125.2_3955- | 3955- |
| 387641.1 | 752776.1 | | | 3957- | 3977 | 752777.1 | | | 3977_C1A_as | 3977 |
| | | | | 3977_G21U_s | | | | | | |
| AD- | A- | GAAACUGGAAGUUAUUUAUUU | 1039 | NM_002973.3_ | 4367- | A- | AAAUAAAUAACUUCCAGUUUCAG | 1314 | NM_009125.2_4142- | |
| 387777.1 | 713323.1 | | | 4367-4387_s | 4387 | 753048.1 | | | 4164_as | |
| AD- | A- | AGUCAUGAACACAUCAGCUAU | 1040 | NM_002973.3_ | 4404- | A- | AUAGCUGAUGUGUUCAUGACUCU | 1315 | NM_009125.2_4179- | |
| 387779.1 | 713361.1 | | | 4404- | 4424 | 753050.1 | | | 4201_C1A_as | |
| | | | | 4424_G21U_s | | | | | | |
| AD- | A- | GUCAUGAACACAUCAGCUAGU | 1041 | NM_002973.3_ | 4405- | A- | ACUAGCTGAUGUGUUCAUGACUC | 1316 | NM_009125.2_4180- | |
| 387780.1 | 713363.1 | | | 4405- | 4425 | 753051.1 | | | 4202_G1A_as | |
| | | | | 4425_C21U_s | | | | | | |
| AD- | A- | UGCUUGCUGAAACUGGAAGUU | 1042 | NM_009125.2_ | 4136- | A- | AACUUCCAGUUUCAGCAAGCAGA | 1317 | NM_009125.2_4134- | 4134- |
| 387806.1 | 753102.1 | | | 4136-4156_s | 4156 | 753103.1 | | | 4156_as | 4156 |
| AD- | A- | CUGAAACUGGAAGUUAUUUAU | 1043 | NM_009125.2_ | 4142- | A- | AUAAAUAACUUCCAGUUUCAGCA | 1318 | NM_009125.2_4140- | 4140- |
| 387812.1 | 753114.1 | | | 4142-4162_s | 4162 | 753115.1 | | | 4162_as | 4162 |
| AD- | A- | UGAAACUGGAAGUUAUUUAUU | 1044 | NM_009125.2_ | 4143- | A- | AAUAAATAACUUCCAGUUUCAGC | 1319 | NM_009125.2_4141- | 4141- |
| 387813.1 | 753116.1 | | | 4143-4163_s | 4163 | 753117.1 | | | 4163_as | 4163 |
| AD- | A- | UUGAGAGUCAUGAACACAUCA | 1045 | NM_009125.2_ | 4176- | A- | UGAUGUGUUCAUGACUCUCAAGG | 1320 | NM_009125.2_4174- | 4174- |
| 387825.1 | 753140.1 | | | 4176-4196_s | 4196 | 753141.1 | | | 4196_as | 4196 |
| AD- | A- | AUGAACACAUCAGCUAGCAAU | 1046 | NM_009125.2_ | 4185- | A- | AUUGCUAGCUGAUGUGUUCAUGA | 1321 | NM_009125.2_4183- | 4183- |
| 387830.1 | 753150.1 | | | 4185- | 4205 | 753151.1 | | | 4205_G1A_as | 4205 |
| | | | | 4205_C21U_s | | | | | | |
| AD- | A- | AGAAGUAACAAGAGUGAUUCU | 1047 | NM_002973.3_ | 4429- | A- | AGAAUCACUCUUGUUACUUCUGU | 1322 | NM_009125.2_4204- | |
| 387831.1 | 713411.1 | | | 4429-4449_s | 4449 | 753152.1 | | | 4226_as | |
| AD- | A- | UGAACACAUCAGCUAGCAACA | 1048 | NM_009125.2_ | 4186- | A- | UGUUGCTAGCUGAUGUGUUCAUG | 1323 | NM_009125.2_4184- | 4184- |
| 387833.1 | 753154.1 | | | 4186-4206_s | 4206 | 753155.1 | | | 4206_as | 4206 |
| AD- | A- | AUCAGCUAGCAACAGAAGUAA | 1049 | NM_009125.2_ | 4193- | A- | UUACUUCUGUUGCUAGCUGAUGU | 1324 | NM_009125.2_4191- | 4191- |
| 387840.1 | 753168.1 | | | 4193-4213_s | 4213 | 753169.1 | | | 4213_as | 4213 |
| AD- | A- | CAGCUAGCAACAGAAGUAACA | 1050 | NM_009125.2_ | 4195- | A- | UGUUACTUCUGUUGCUAGCUGAU | 1325 | NM_009125.2_4193- | 4193- |
| 387842.1 | 753172.1 | | | 4195-4215_s | 4215 | 753173.1 | | | 4215_as | 4215 |
| AD- | A- | CUAGCAACAGAAGUAACAAGA | 1051 | NM_009125.2_ | 4198- | A- | UCUUGUTACUUCUGUUGCUAGCU | 1326 | NM_009125.2_4196- | 4196- |
| 387845.1 | 753178.1 | | | 4198-4218_s | 4218 | 753179.1 | | | 4218_as | 4218 |
| AD- | A- | UAGCAACAGAAGUAACAAGAU | 1052 | NM_009125.2_ | 4199- | A- | AUCUUGTUACUUCUGUUGCUAGC | 1327 | NM_009125.2_4197- | 4197- |
| 387846.1 | 753180.1 | | | 4199- | 4219 | 753181.1 | | | 4219_C1A_as | 4219 |
| | | | | 4219_G21U_s | | | | | | |
| AD- | A- | CUUGCUGCUAUUACCGCUUUA | 1053 | NM_009125.2_ | 4225- | A- | UAAAGCGGUAAUAGCAGCAAGAA | 1328 | NM_009125.2_4223- | 4223- |
| 387858.1 | 753204.1 | | | 4225-4245_s | 4245 | 753205.1 | | | 4245_as | 4245 |
| AD- | A- | GCUGCUAUUACCGCUUUAAAA | 1054 | NM_009125.2_ | 4228- | A- | UUUUAAAGCGGUAAUAGCAGCAA | 1329 | NM_009125.2_4226- | 4226- |
| 387861.1 | 753210.1 | | | 4228-4248_s | 4248 | 753211.1 | | | 4248_as | 4248 |
| AD- | A- | CCCUUUUACUAAACUUGACAU | 1055 | NM_009125.2_ | 4272- | A- | AUGUCAAGUUUAGUAAAAGGGCG | 1330 | NM_009125.2_4270- | 4270- |
| 387863.1 | 753214.1 | | | 4272- | 4292 | 753215.1 | | | 4292_C1A_as | 4292 |
| | | | | 4292_G21U_s | | | | | | |
| AD- | A- | CUUUUACUAAACUUGACAGAA | 1056 | NM_009125.2_ | 4274- | A- | UUCUGUCAAGUUUAGUAAAAGGG | 1331 | NM_009125.2_4272- | 4272- |
| 387865.1 | 753218.1 | | | 4274-4294_s | 4294 | 753219.1 | | | 4294_as | 4294 |
| AD- | A- | UUUUACUAAACUUGACAGAAU | 1057 | NM_009125.2_ | 4275- | A- | AUUCUGTCAAGUUUAGUAAAAGG | 1332 | NM_009125.2_4273- | 4273- |
| 387866.1 | 753220.1 | | | 4275- | 4295 | 753221.1 | | | 4295_C1A_as | 4295 |
| | | | | 4295_G21U_s | | | | | | |
| AD- | A- | UACUAAACUUGACAGAAGUUU | 1058 | NM_009125.2_ | 4278- | A- | AAACUUCUGUCAAGUUUAGUAAA | 1333 | NM_009125.2_4276- | 4276- |
| 387869.1 | 753226.1 | | | 4278- | 4298 | 753227.1 | | | 4298_G1A_as | 4298 |
| | | | | 4298_C21U_s | | | | | | |
| AD- | A- | CUAAACUUGACAGAAGUUCAU | 1059 | NM_009125.2_ | 4280- | A- | AUGAACTUCUGUCAAGUUUAGUA | 1334 | NM_009125.2_4278- | 4278- |
| 387871.1 | 753230.1 | | | 4280- | 4300 | 753231.1 | | | 4300_C1A_as | 4300 |
| | | | | 4300_G21U_s | | | | | | |
| AD- | A- | ACUUGACAGAAGUUCAGUAAA | 1060 | NM_009125.2_ | 4284- | A- | UUUACUGAACUUCUGUCAAGUUU | 1335 | NM_009125.2_4282- | 4282- |
| 387875.1 | 753238.1 | | | 4284-4304_s | 4304 | 753239.1 | | | 4304_as | 4304 |
| AD- | A- | UGACAGAAGUUCAGUAAAUUU | 1061 | NM_009125.2_ | 4287- | A- | AAAUUUACUGAACUUCUGUCAAG | 1336 | NM_009125.2_4285- | 4285- |
| 387878.1 | 753244.1 | | | 4287- | 4307 | 753245.1 | | | 4307_G1A_as | 4307 |
| | | | | 4307_C21U_s | | | | | | |
| AD- | A- | ACAGAAGUUCAGUAAAUUCUU | 1062 | NM_009125.2_ | 4289- | A- | AAGAAUTUACUGAACUUCUGUCA | 1337 | NM_009125.2_4287- | 4287- |
| 387880.1 | 753248.1 | | | 4289-4309_s | 4309 | 753249.1 | | | 4309_as | 4309 |
| AD- | A- | CAGAAGUUCAGUAAAUUCUUA | 1063 | NM_009125.2_ | 4290- | A- | UAAGAATUUACUGAACUUCUGUC | 1338 | NM_009125.2_4288- | 4288- |
| 387881.1 | 753250.1 | | | 4290-4310_s | 4310 | 753251.1 | | | 4310_as | 4310 |
| AD- | A- | AGAAGUUCAGUAAAUUCUUAU | 1064 | NM_009125.2_ | 4291- | A- | AUAAGAAUUUACUGAACUUCUGU | 1339 | NM_009125.2_4289- | 4289- |
| 387882.1 | 753252.1 | | | 4291- | 4311 | 753253.1 | | | 4311_G1A_as | 4311 |
| | | | | 4311_C21U_s | | | | | | |
| AD- | A- | CCAAACUGACGGAUUAUUAUU | 1065 | NM_009125.2_ | 4314- | A- | AAUAAUAAUCCGUCAGUUUGGCG | 1340 | NM_009125.2_4312- | 4312- |
| 387909.1 | 753302.1 | | | 4314-4334_s | 4334 | 753303.1 | | | 4334_as | 4334 |
| AD- | A- | AAAACUUUUACUUUGUAGAUA | 1066 | NM_002973.3_ | 4626- | A- | UAUCUACAAAGUAAAAGUUUUCC | 1341 | NM_009125.2_4393- | |
| 387937.1 | 713735.1 | | | 4626-4646_s | 4646 | 753358.1 | | | 4415_as | |
| AD- | A- | GUUAAGGGAAAACUUUUACUU | 1067 | NM_009125.2_ | 4387- | A- | AAGUAAAAGUUUUCCCUUAACUU | 1342 | NM_009125.2_4385- | 4385- |
| 387940.1 | 753362.1 | | | 4387-4407_s | 4407 | 753363.1 | | | 4407_as | 4407 |
| AD- | A- | UUAAGGGAAAACUUUUACUUU | 1068 | NM_009125.2_ | 4388- | A- | AAAGUAAAAGUUUUCCCUUAACU | 1343 | NM_009125.2_4386- | 4386- |
| 387941.1 | 753364.1 | | | 4388-4408_s | 4408 | 753365.1 | | | 4408_as | 4408 |
| AD- | A- | UAAGGGAAAACUUUUACUUUG | 1069 | NM_009125.2_ | 4389- | A- | CAAAGUAAAAGUUUUCCCUUAAC | 1344 | NM_009125.2_4387- | 4387- |
| 387942.1 | 753366.1 | | | 4389-4409_s | 4409 | 753367.1 | | | 4409_as | 4409 |
| AD- | A- | AGGGAAAACUUUUACUUUGUA | 1070 | NM_009125.2_ | 4391- | A- | UACAAAGUAAAAGUUUUCCCUUA | 1345 | NM_009125.2_4389- | 4389- |
| 387944.1 | 753370.1 | | | 4391-4411_s | 4411 | 753371.1 | | | 4411_as | 4411 |
| AD- | A- | GGGAAAACUUUUACUUUGUAU | 1071 | NM_009125.2_ | 4392- | A- | AUACAAAGUAAAAGUUUUCCCUU | 1346 | NM_009125.2_4390- | 4390- |
| 387945.1 | 753372.1 | | | 4392- | 4412 | 753373.1 | | | 4412_C1A_as | 4412 |
| | | | | 4412_G21U_s | | | | | | |
| AD- | A- | GAAAACUUUUACUUUGUAGAU | 1072 | NM_009125.2_ | 4394- | A- | AUCUACAAAGUAAAAGUUUUCCC | 1347 | NM_009125.2_4392- | 4392- |
| 387947.1 | 753376.1 | | | 4394-4414_s | 4414 | 753377.1 | | | 4414_as | 4414 |
| AD- | A- | UCCGACUUCCGGUAAAGAGUU | 1073 | NM_002973.3_ | 92- | A- | AACUCUTUACCGGAAGUCGGAGG | 1348 | NM_002973.3_90- | 90- |
| 364136.1 | 706003.1 | | | 92-112_C21U_s | 112 | 706004.1 | | | 112_G1A_as | 112 |
| AD- | A- | CCGACUUCCGGUAAAGAGUCU | 1074 | NM_002973.3_ | 93- | A- | AGACUCTUUACCGGAAGUCGGAG | 1349 | NM_002973.3_91- | 91- |
| 364137.1 | 706005.1 | | | 93-113_C21U_s | 113 | 706006.1 | | | 113_G1A_as | 113 |
| AD- | A- | CGACUUCCGGUAAAGAGUCCU | 1075 | NM_002973.3_ | 94- | A- | AGGACUCUUUACCGGAAGUCGGA | 1350 | NM_002973.3_92- | 92- |
| 364138.1 | 706007.1 | | | 94-114_C21U_s | 114 | 706008.1 | | | 114_G1A_as | 114 |
| AD- | A- | AAUGUGAAGUACAAGUGAAAA | 1076 | NM_002973.3_ | 998- | A- | UUUUCACUUGUACUUCACAUUUG | 1351 | NM_002973.3_996- | 996- |
| 365055.1 | 707841.1 | | | 998-1018_s | 1018 | 707842.1 | | | 1018_as | 1018 |
| AD- | A- | AUGUGAAGUACAAGUGAAAAA | 1077 | NM_002973.3_ | 999- | A- | UUUUUCACUUGUACUUCACAUUU | 1352 | NM_002973.3_997- | 997- |
| 365056.1 | 707843.1 | | | 999-1019_s | 1019 | 707844.1 | | | 1019_as | 1019 |
| AD- | A- | CAUGAGAAAAGUACAGAAUCU | 1078 | NM_002973.3_ | 1087- | A- | AGAUUCTGUACUUUUCUCAUGUG | 1353 | NM_002973.3_1085- | 1085- |
| 365144.1 | 708019.1 | | | 1087- | 1107 | 708020.1 | | | 1107_G1A_as | 1107 |
| | | | | 1107_C21U_s | | | | | | |
| AD- | A- | CACUUCUCACACUUCAGAUUU | 1079 | NM_002973.3_ | 1746- | A- | AAAUCUGAAGUGUGAGAAGUGGA | 1354 | NM_002973.3_1744- | 1744- |
| 365747.1 | 709225.1 | | | 1746-1766_s | 1766 | 709226.1 | | | 1766_as | 1766 |
| AD- | A- | ACUUCUCACACUUCAGAUUUC | 1080 | NM_002973.3_ | 1747- | A- | GAAAUCTGAAGUGUGAGAAGUGG | 1355 | NM_002973.3_1745- | 1745- |
| 365748.1 | 709227.1 | | | 1747-1767_s | 1767 | 709228.1 | | | 1767_as | 1767 |
| AD- | A- | CUUCUCACACUUCAGAUUUCA | 1081 | NM_002973.3_ | 1748- | A- | UGAAAUCUGAAGUGUGAGAAGUG | 1356 | NM_002973.3_1746- | 1746- |
| 365749.1 | 709229.1 | | | 1748-1768_s | 1768 | 709230.1 | | | 1768_as | 1768 |
| AD- | A- | UUCUCACACUUCAGAUUUCAA | 1082 | NM_002973.3_ | 1749- | A- | UUGAAATCUGAAGUGUGAGAAGU | 1357 | NM_002973.3_1747- | 1747- |
| 365750.1 | 709231.1 | | | 1749-1769_s | 1769 | 709232.1 | | | 1769_as | 1769 |

TABLE 4
ATXN2 in vitro screen in Cos-7 (Human Dual-Luciferase (DL) psiCHECK2 vector) and Endogenous Cell Systems.
Data are expressed as percent transcript remaining, relative to AD-1955 non-targeting control.

| | DL | | DL 0.1 | | BE(2)-C | | BE(2-C | | Neuro-2A | |
|---|---|---|---|---|---|---|---|---|---|---|
| Sample | 10 nM | STDEV | nM | STDEV | 10 nM | STDEV | 0.1 nM | STDEV | 10 nM | STDEV |
| AD-364136.1 | 35.2 | 16.3 | 100.9 | 10.2 | 110.4 | 14.4 | 104.8 | 5.8 | 94.7 | 34.4 |
| AD-364137.1 | 19.7 | 9.6 | 95.8 | 31.2 | 118.3 | 26.2 | 119.0 | 29.9 | 105.2 | 21.1 |
| AD-364138.1 | 62.6 | 6.4 | 69.1 | 2.5 | 91.9 | 28.9 | 128.7 | 20.8 | 114.1 | 13.1 |
| AD-365055.1 | 11.4 | 5.7 | 83.8 | 20.9 | 64.9 | 15.4 | 61.2 | 9.0 | 36.1 | 3.9 |
| AD-365056.1 | 11.1 | 8.2 | 73.4 | 25.2 | 60.6 | 8.7 | 79.2 | 10.1 | 36.1 | 3.9 |
| AD-365144.1 | 15.4 | 9.1 | 55.4 | 9.0 | 62.5 | 11.7 | 82.4 | 16.7 | 27.1 | 2.1 |
| AD-365747.1 | 44.9 | 17.9 | 97.3 | 48.1 | 47.0 | 8.9 | 74.3 | 11.5 | 47.4 | 11.2 |
| AD-365748.1 | 59.2 | 25.3 | 89.8 | 17.8 | 60.0 | 19.6 | 95.5 | 22.4 | 39.1 | 6.1 |
| AD-365749.1 | 51.0 | 17.0 | 96.0 | 25.7 | 56.3 | 5.5 | 109.2 | 28.5 | 54.8 | 8.1 |
| AD-365750.1 | 48.5 | 2.2 | 71.2 | 16.0 | 90.1 | 21.6 | 93.8 | 19.6 | 57.9 | 11.4 |
| AD-365751.1 | 68.3 | 30.4 | 100.9 | 7.8 | 80.4 | 8.0 | 123.1 | 17.2 | 91.5 | 22.8 |
| AD-365752.1 | 52.3 | 19.1 | 79.4 | 0.9 | 56.5 | 5.3 | 72.7 | 15.0 | 50.7 | 6.5 |
| AD-365753.1 | 58.5 | 11.4 | 89.2 | 9.4 | 97.5 | 35.5 | 113.8 | 38.9 | 60.2 | 8.7 |
| AD-365754.1 | 68.9 | 24.4 | 72.6 | 16.7 | 81.3 | 16.9 | 104.4 | 8.2 | 54.5 | 8.2 |
| AD-365757.1 | 26.2 | 12.3 | 59.9 | 16.0 | 55.1 | 9.6 | 133.1 | 25.3 | 32.6 | 6.7 |
| AD-365784.1 | 43.3 | 14.4 | 78.8 | 26.2 | 53.7 | 13.0 | 104.7 | 22.5 | 44.9 | 5.4 |
| AD-365785.1 | 64.6 | 2.8 | 89.2 | 19.8 | 73.7 | 5.8 | 93.1 | 16.1 | 85.8 | 8.4 |
| AD-365915.1 | 25.9 | 7.6 | 84.8 | 31.0 | 47.1 | 10.0 | 81.4 | 13.3 | 34.8 | 5.2 |
| AD-365916.1 | 23.2 | 7.3 | 77.8 | 25.2 | 41.6 | 10.1 | 76.3 | 12.1 | 38.4 | 7.5 |
| AD-365918.1 | 60.3 | 19.4 | 87.7 | 10.7 | 101.4 | 14.0 | 134.1 | 37.8 | 94.1 | 8.1 |
| AD-366362.1 | 41.1 | 4.8 | 72.2 | 42.8 | 84.5 | 25.1 | 111.2 | 36.0 | 93.0 | 18.6 |
| AD-366363.1 | 21.3 | 4.5 | 67.3 | 25.0 | 40.3 | 12.6 | 107.0 | 33.5 | 36.8 | 7.3 |
| AD-366364.1 | 48.5 | 24.6 | 81.1 | 17.2 | 50.4 | 7.3 | 79.6 | 13.2 | 44.6 | 7.2 |
| AD-366365.1 | 43.8 | 22.5 | 96.4 | 16.8 | 63.9 | 7.5 | 56.8 | 6.0 | 40.2 | 7.6 |
| AD-366366.1 | 17.4 | 4.7 | 78.8 | 12.4 | 39.3 | 13.4 | 76.3 | 14.5 | 20.7 | 5.7 |
| AD-366367.1 | 44.8 | 29.3 | 78.6 | 8.7 | 67.4 | 22.0 | 82.0 | 12.2 | 35.9 | 6.4 |
| AD-366368.1 | 56.5 | 12.5 | 87.5 | 45.8 | 84.7 | 13.0 | 75.0 | 6.6 | 49.7 | 3.2 |
| AD-366369.1 | 22.8 | 12.8 | 48.6 | 9.0 | 56.1 | 2.4 | 82.3 | 5.1 | 36.6 | 10.2 |
| AD-366772.1 | 56.8 | 16.6 | 62.4 | 26.4 | 72.2 | 13.3 | 96.3 | 38.2 | 77.7 | 16.0 |
| AD-366815.1 | 34.1 | 5.0 | 94.5 | 5.6 | 70.8 | 11.2 | 122.1 | 8.1 | 54.6 | 12.1 |
| AD-366818.1 | 33.6 | 2.5 | 84.5 | 43.5 | 64.6 | 7.9 | 109.9 | 4.6 | 59.7 | 20.4 |
| AD-366819.1 | 72.6 | 3.4 | 75.0 | 25.9 | 128.5 | 42.4 | 87.0 | 15.1 | 101.5 | 20.7 |
| AD-366820.1 | 52.7 | 20.1 | 69.6 | 12.5 | 67.0 | 7.9 | 76.2 | 5.5 | 58.8 | 12.1 |
| AD-366822.1 | 63.2 | 20.0 | 97.5 | 23.7 | 88.2 | 26.2 | 83.6 | 10.2 | 82.8 | 7.6 |
| AD-367069.1 | 52.1 | 18.5 | 76.6 | 8.2 | 89.6 | 30.4 | 69.9 | 10.3 | 73.5 | 15.8 |
| AD-367071.1 | 44.6 | 16.6 | 94.4 | 15.8 | 71.7 | 18.7 | 67.8 | 4.2 | 65.5 | 15.6 |
| AD-367098.1 | 65.9 | 25.6 | 79.0 | 11.0 | 70.7 | 11.1 | 90.8 | 3.0 | 78.4 | 10.6 |
| AD-367101.1 | 62.1 | 22.6 | 110.9 | 28.1 | 85.0 | 26.5 | 80.1 | 9.3 | 81.7 | 16.6 |
| AD-367102.1 | 52.8 | 27.2 | 97.6 | 30.5 | 98.3 | 25.2 | 71.0 | 24.3 | 85.3 | 6.1 |
| AD-367103.1 | 38.2 | 2.6 | 88.5 | 6.4 | 87.7 | 31.7 | 107.9 | 26.0 | 104.4 | 17.9 |
| AD-367104.1 | 31.2 | 14.4 | 93.7 | 39.8 | 72.1 | 5.2 | 115.0 | 17.9 | 93.7 | 13.1 |
| AD-367105.1 | 35.5 | 6.9 | 89.1 | 9.3 | 80.0 | 22.7 | 87.8 | 18.4 | 79.6 | 6.1 |
| AD-367106.1 | 64.8 | 27.7 | 71.9 | 7.0 | 111.6 | 28.8 | 75.1 | 22.3 | 97.5 | 17.1 |
| AD-367107.1 | 57.6 | 0.9 | 68.5 | 21.0 | 85.1 | 9.7 | 83.2 | 15.0 | 93.8 | 21.3 |
| AD-367108.1 | 38.8 | 16.3 | 74.9 | 4.0 | 94.0 | 24.8 | 77.8 | 19.0 | 88.2 | 19.1 |
| AD-367438.1 | 58.6 | 9.7 | 106.6 | 52.1 | 92.6 | 31.3 | 90.4 | 9.6 | 31.5 | 9.9 |
| AD-367439.1 | 41.0 | 21.1 | 88.1 | 11.1 | 52.8 | 4.1 | 57.1 | 13.5 | 16.1 | 7.9 |
| AD-367440.1 | 31.7 | 11.9 | 77.9 | 24.8 | 56.8 | 12.2 | 65.2 | 20.2 | 34.0 | 2.6 |
| AD-367448.1 | 55.9 | 10.3 | 92.2 | 1.0 | 102.6 | 16.6 | 55.0 | 7.9 | 63.0 | 8.9 |
| AD-367448.2 | 60.5 | 0.6 | 78.6 | 5.3 | 83.3 | 14.8 | 70.1 | 13.8 | 55.0 | 9.4 |
| AD-367451.1 | 33.7 | 3.7 | 105.3 | 34.6 | 47.0 | 10.2 | 67.1 | 6.9 | 27.3 | 5.5 |
| AD-367453.1 | 54.1 | 21.1 | 63.1 | 14.8 | 81.0 | 14.2 | 53.9 | 12.2 | 34.3 | 11.2 |
| AD-367453.2 | 33.8 | 13.7 | 87.0 | 31.7 | 53.8 | 5.0 | 69.1 | 17.9 | 17.1 | 4.0 |
| AD-367454.1 | 44.9 | 23.4 | 72.5 | 16.5 | 51.2 | 8.4 | 51.8 | 8.6 | 17.0 | 6.7 |
| AD-367456.1 | 53.5 | 21.5 | 72.0 | 4.6 | 74.2 | 9.7 | 96.4 | 30.2 | 51.7 | 6.0 |
| AD-367477.1 | 59.7 | 37.7 | 95.9 | 36.2 | 89.5 | 17.9 | 118.9 | 31.7 | 94.3 | 18.6 |
| AD-367480.1 | 17.9 | 22.1 | 63.7 | 7.9 | 78.0 | 7.0 | 133.6 | 9.6 | 68.4 | 21.3 |
| AD-367482.1 | 21.2 | 19.0 | 81.9 | 26.0 | 54.1 | 1.7 | 110.1 | 11.6 | 22.0 | 8.6 |
| AD-367483.1 | 32.1 | 8.9 | 105.0 | 18.2 | 91.3 | 27.6 | 91.6 | 7.0 | 36.7 | 15.5 |
| AD-367486.1 | 31.9 | 18.4 | 53.9 | 13.3 | 69.3 | 16.9 | 56.3 | 6.9 | 15.3 | 8.0 |
| AD-367487.1 | 38.8 | 21.8 | 75.4 | 11.0 | 83.9 | 11.2 | 101.8 | 28.0 | 49.4 | 8.6 |
| AD-367513.1 | 44.4 | 10.3 | 79.6 | 38.7 | 96.4 | 6.6 | 114.1 | 13.0 | 68.0 | 5.4 |
| AD-367530.1 | 53.4 | 18.3 | 68.0 | 9.8 | 67.9 | 4.8 | 132.8 | 10.5 | 49.4 | 16.1 |
| AD-367532.1 | 45.0 | 5.7 | 91.5 | 13.5 | 95.6 | 10.3 | 121.2 | 29.3 | 66.6 | 11.5 |
| AD-367571.1 | 46.5 | 12.1 | 70.3 | 29.8 | 101.5 | 27.9 | 81.7 | 11.4 | 99.0 | 23.7 |
| AD-367572.1 | 60.7 | 11.1 | 90.1 | 41.6 | 89.2 | 9.0 | 84.3 | 13.0 | 99.1 | 19.4 |
| AD-367573.1 | 75.4 | 13.8 | 75.8 | 35.2 | 71.5 | 4.3 | 49.2 | 11.9 | 71.3 | 17.6 |
| AD-367575.1 | 65.1 | 11.7 | 68.3 | 30.6 | 93.7 | 13.9 | 118.3 | 27.5 | 63.5 | 8.3 |
| AD-367577.1 | 51.2 | 16.1 | 87.9 | 24.4 | 62.1 | 2.5 | 100.7 | 15.0 | 73.0 | 11.0 |
| AD-367630.1 | 37.4 | 14.5 | 104.4 | 39.0 | 68.1 | 5.7 | 49.3 | 11.7 | 42.1 | 13.1 |
| AD-367632.1 | 76.0 | 29.4 | 85.4 | 11.6 | 74.5 | 23.2 | 33.3 | 7.4 | 76.1 | 12.5 |
| AD-367633.1 | 59.0 | 33.1 | 93.0 | 42.6 | 75.7 | 13.9 | 75.7 | 11.3 | 94.8 | 13.1 |
| AD-367636.1 | 91.5 | 30.8 | 95.0 | 28.2 | 81.7 | 17.8 | 104.3 | 23.5 | 105.6 | 15.0 |
| AD-367646.1 | 37.8 | 3.1 | 86.7 | 9.5 | 60.8 | 15.5 | 88.0 | 23.5 | 39.4 | 4.7 |
| AD-367685.1 | 40.6 | 3.0 | 68.3 | 32.9 | 65.6 | 22.3 | 48.6 | 4.3 | 93.0 | 18.1 |
| AD-367688.1 | 53.2 | 12.6 | 83.4 | 33.0 | 40.4 | 6.1 | 36.0 | 8.8 | 70.4 | 9.3 |
| AD-367690.1 | 43.9 | 5.9 | 94.1 | 35.4 | 61.4 | 18.1 | 52.9 | 9.3 | 36.3 | 6.3 |
| AD-367691.1 | 44.4 | 20.3 | 81.3 | 3.2 | 78.8 | 9.3 | 62.1 | 13.4 | 83.4 | 5.7 |
| AD-367694.1 | 31.6 | 13.5 | 95.8 | 8.7 | 78.8 | 22.1 | 52.5 | 7.1 | 94.7 | 31.9 |
| AD-367696.1 | 39.4 | 19.8 | 105.0 | 17.2 | 62.9 | 13.9 | 94.9 | 17.6 | 72.3 | 16.2 |
| AD-367697.1 | 18.0 | 1.8 | 107.9 | 23.1 | 58.0 | 12.7 | 42.5 | 4.0 | 62.3 | 11.4 |
| AD-367698.1 | 48.4 | 20.2 | 97.4 | 19.3 | 72.9 | 18.4 | 51.0 | 12.2 | 81.0 | 11.3 |
| AD-367699.1 | 53.5 | 21.9 | 87.6 | 8.8 | 70.9 | 11.4 | 45.6 | 11.5 | 72.0 | 12.3 |
| AD-367704.1 | 21.2 | 7.0 | 87.6 | 4.4 | 50.8 | 12.1 | 37.9 | 3.9 | 49.8 | 10.8 |
| AD-367705.1 | 21.5 | 10.4 | 55.7 | 1.4 | 42.9 | 9.4 | 58.6 | 13.3 | 38.3 | 13.1 |
| AD-367706.1 | 43.2 | 14.7 | 69.1 | 12.4 | 64.9 | 23.4 | 78.6 | 12.2 | 56.2 | 12.9 |
| AD-367707.1 | 24.7 | 8.8 | 88.3 | 12.4 | 40.9 | 7.0 | 45.1 | 13.5 | 19.9 | 3.2 |
| AD-367708.1 | 23.6 | 8.7 | 83.5 | 24.5 | 66.7 | 9.8 | 37.5 | 7.1 | 23.0 | 3.2 |
| AD-367709.1 | 30.0 | 9.4 | 85.8 | 28.3 | 59.5 | 11.9 | 41.2 | 7.4 | 17.9 | 1.1 |
| AD-367713.1 | 41.1 | 21.0 | 67.6 | 18.2 | 63.7 | 6.6 | 35.2 | 13.1 | 39.1 | 5.1 |
| AD-367718.1 | 63.4 | 20.7 | 89.9 | 15.6 | 122.9 | 19.1 | 83.1 | 18.0 | 80.3 | 10.5 |
| AD-367745.1 | 67.1 | 32.5 | 72.0 | 53.9 | 84.4 | 18.9 | 108.2 | 24.7 | 89.5 | 7.9 |
| AD-367746.1 | 75.1 | 19.2 | 78.0 | 18.3 | 90.0 | 16.6 | 109.3 | 39.7 | 95.3 | 15.5 |
| AD-367755.1 | 42.9 | 1.2 | 73.4 | 15.7 | 68.0 | 8.4 | 44.6 | 6.6 | 76.9 | 14.5 |
| AD-367792.1 | 53.9 | 33.4 | 89.0 | 2.8 | 69.2 | 20.7 | 49.2 | 10.0 | 60.5 | 5.2 |
| AD-367794.1 | 22.7 | 6.9 | 75.8 | 21.5 | 50.9 | 12.7 | 51.8 | 21.5 | 18.6 | 3.5 |
| AD-367795.1 | 41.9 | 8.4 | 76.9 | 2.8 | 57.7 | 8.3 | 84.1 | N/A | 37.2 | 2.2 |
| AD-367796.1 | 19.1 | 4.3 | 76.3 | 36.2 | 55.5 | 12.5 | 93.2 | 14.4 | 26.9 | 4.3 |
| AD-367797.1 | 28.1 | 21.1 | 90.5 | 24.6 | 36.1 | 6.5 | 67.7 | 12.4 | 21.9 | 5.3 |
| AD-367801.1 | 39.9 | 14.6 | 91.9 | 2.0 | 64.5 | 16.8 | 87.1 | 19.7 | 72.3 | 8.5 |
| AD-367802.1 | 66.7 | 19.8 | 89.1 | 35.1 | 78.7 | 24.6 | 72.0 | 26.3 | 66.1 | 17.2 |
| AD-367805.1 | 29.6 | 9.8 | 68.1 | 26.2 | 56.9 | 8.2 | 115.8 | 22.4 | 62.9 | 11.4 |
| AD-367809.1 | 26.1 | 11.5 | 73.1 | 33.6 | 33.7 | 4.6 | 67.5 | 26.2 | 24.9 | 10.7 |
| AD-367815.1 | 3.9 | 10.6 | 62.5 | 20.9 | 61.1 | 17.4 | 70.1 | 10.2 | 21.8 | 3.5 |
| AD-367816.1 | 32.0 | 5.2 | 78.8 | 12.9 | 47.1 | 10.0 | 34.3 | 10.0 | 16.3 | 4.9 |
| AD-367816.2 | 15.6 | 7.2 | 82.6 | 18.7 | 43.5 | 9.5 | 142.0 | 44.0 | 25.5 | 1.9 |
| AD-367817.1 | 34.5 | 3.8 | 73.0 | 26.6 | 66.5 | 8.1 | 109.8 | 31.2 | 34.3 | 7.9 |
| AD-367818.1 | 23.1 | 14.0 | 82.8 | 7.9 | 47.3 | 7.1 | 101.2 | 22.4 | 22.9 | 4.6 |
| AD-367819.1 | 61.8 | 13.5 | 79.9 | 40.8 | 76.7 | 18.4 | 38.3 | 9.4 | 35.1 | 2.5 |
| AD-367819.2 | 68.7 | 23.2 | 82.6 | 22.0 | 65.1 | 9.2 | 90.9 | 30.2 | 52.9 | 5.1 |
| AD-367820.1 | 20.1 | 4.9 | 79.0 | 35.1 | 58.7 | 13.5 | 46.7 | 15.3 | 23.6 | 6.4 |
| AD-367821.1 | 32.8 | 18.9 | 69.4 | 39.1 | 77.9 | 21.1 | 40.7 | 7.5 | 52.5 | 6.5 |
| AD-367822.1 | 38.6 | 15.9 | 125.9 | 8.7 | 64.1 | 1.4 | 92.5 | 19.7 | 55.4 | 15.2 |
| AD-367826.1 | 30.0 | 16.8 | 81.5 | 51.3 | 86.9 | 20.0 | 92.5 | 24.0 | 50.9 | 13.2 |
| AD-367832.1 | 16.2 | 4.2 | 70.3 | 18.2 | 64.7 | 7.5 | 77.6 | 20.1 | 40.2 | 8.9 |
| AD-367844.1 | 70.6 | 8.3 | 77.2 | 36.0 | 113.5 | 28.4 | 120.0 | 17.9 | 82.0 | 16.7 |
| AD-367845.1 | 27.1 | 13.2 | 69.2 | 10.4 | 62.9 | 7.4 | 115.2 | 36.3 | 20.5 | 7.3 |
| AD-367846.1 | 39.9 | 22.0 | 66.9 | 16.2 | 53.2 | 10.0 | 98.7 | 21.1 | 32.0 | 11.3 |
| AD-367850.1 | 8.8 | 3.7 | 78.2 | 20.7 | 54.2 | 12.0 | 69.6 | 7.4 | 16.1 | 2.4 |
| AD-367851.1 | 19.3 | 2.4 | 71.6 | 40.7 | 61.7 | 24.3 | 81.7 | 15.9 | 26.9 | 3.4 |
| AD-367853.1 | 16.3 | 7.1 | 66.9 | 3.9 | 43.8 | 9.0 | 72.6 | 10.9 | 21.5 | 4.7 |
| AD-367872.1 | 33.5 | 15.1 | 75.7 | 36.4 | 38.4 | 9.8 | 101.3 | 21.3 | 31.2 | 1.4 |
| AD-367873.1 | 30.0 | 2.3 | 115.1 | 62.5 | 73.0 | 22.6 | 97.6 | 23.7 | 52.9 | 12.5 |
| AD-367875.1 | 45.1 | 38.0 | 94.8 | 17.9 | 83.9 | 12.7 | 91.0 | 4.6 | 49.8 | 9.5 |
| AD-367876.1 | 34.6 | 14.3 | 107.4 | 28.9 | 93.1 | 22.3 | 91.1 | 11.4 | 55.2 | 12.3 |
| AD-367877.1 | 38.4 | 24.3 | 58.9 | 6.5 | 57.0 | 3.3 | 110.8 | 38.2 | 32.9 | 7.4 |
| AD-367878.1 | 23.9 | 5.7 | 121.7 | 6.6 | 64.5 | 9.1 | 52.0 | 9.5 | 20.6 | 5.2 |
| AD-367878.2 | 16.6 | 15.1 | 53.5 | 4.7 | 43.9 | 9.5 | 110.5 | 46.4 | 27.1 | 6.5 |
| AD-367902.1 | 64.0 | 14.4 | 69.1 | 2.7 | 123.1 | 36.4 | 97.7 | 8.3 | 91.4 | 6.1 |
| AD-367903.1 | 48.1 | 16.8 | 91.6 | 27.9 | 109.0 | 33.6 | 116.2 | 21.7 | 71.2 | 10.3 |
| AD-367904.1 | 51.5 | 2.6 | 89.6 | 18.3 | 105.1 | 26.9 | 51.8 | 9.4 | 98.8 | 16.7 |
| AD-367905.1 | 34.1 | 8.1 | 93.2 | 17.8 | 69.3 | 15.3 | 29.2 | 6.6 | 24.9 | 4.1 |
| AD-367906.1 | 20.7 | 9.5 | 99.4 | 34.7 | 59.3 | 3.1 | 35.8 | 4.3 | 21.8 | 2.7 |
| AD-367907.1 | 62.7 | 3.8 | 98.2 | 42.0 | 74.8 | 21.0 | 40.2 | 5.0 | 39.3 | 7.2 |
| AD-367908.1 | 62.1 | 29.5 | 114.0 | 36.7 | 79.0 | 21.8 | 56.8 | 10.8 | 28.9 | 6.8 |
| AD-367909.1 | 67.6 | 20.4 | 70.1 | 44.9 | 96.8 | 24.5 | 57.7 | 9.5 | 45.9 | 8.7 |
| AD-367910.1 | 58.4 | 14.2 | 70.5 | 36.0 | 108.3 | 16.3 | 53.7 | 11.0 | 30.4 | 8.4 |
| AD-367911.1 | 29.3 | 2.0 | 95.8 | 2.3 | 89.5 | 10.6 | 41.9 | 10.2 | 56.7 | 7.4 |
| AD-367912.1 | 83.7 | 32.5 | 81.6 | 13.6 | 98.8 | 26.1 | 51.4 | 5.7 | 57.2 | 14.5 |
| AD-367913.1 | 59.4 | 16.0 | 66.7 | 10.5 | 108.3 | 32.7 | 35.9 | 6.3 | 65.1 | 5.5 |
| AD-367914.1 | 62.5 | 8.4 | 100.1 | 19.5 | 96.7 | 18.1 | 128.8 | 12.2 | 50.3 | 9.7 |
| AD-367915.1 | 60.6 | 19.2 | 99.7 | 8.1 | 86.0 | 12.3 | 128.7 | 28.3 | 67.0 | 11.7 |
| AD-367916.1 | 41.8 | 3.9 | 79.8 | 26.8 | 71.3 | 26.3 | 105.0 | 8.0 | 26.9 | 3.3 |
| AD-367917.1 | 19.6 | 6.5 | 41.7 | 10.0 | 69.3 | 11.6 | 75.8 | 13.0 | 20.7 | 4.5 |
| AD-367918.1 | 15.6 | 4.2 | 93.6 | 19.4 | 48.9 | 11.3 | 86.3 | 14.7 | 19.7 | 4.1 |
| AD-367925.1 | 48.1 | 30.2 | 86.0 | 51.1 | 65.0 | 6.6 | 76.3 | 11.1 | 45.5 | 8.8 |
| AD-367950.1 | 25.6 | 9.5 | 92.6 | 23.1 | 50.4 | 10.4 | 119.5 | 26.7 | 45.0 | 10.0 |
| AD-367967.1 | 11.3 | 5.8 | 68.8 | 1.7 | 56.4 | 20.4 | 33.2 | 6.9 | 14.4 | 3.6 |
| AD-367968.1 | 64.3 | 39.9 | 81.6 | 6.9 | 72.5 | 17.2 | 33.5 | 8.3 | 32.4 | 6.9 |
| AD-367972.1 | 62.5 | 22.4 | 96.6 | 6.1 | 76.8 | 23.4 | 52.8 | 11.7 | 52.3 | 7.4 |
| AD-367973.1 | 47.3 | 14.7 | 56.8 | 19.7 | 86.2 | 23.8 | 58.0 | 9.6 | 31.8 | 11.6 |
| AD-367982.1 | 25.6 | 15.9 | 87.4 | 19.9 | 45.6 | 10.0 | 132.5 | 23.4 | 36.7 | 16.1 |
| AD-367984.1 | 14.8 | 3.5 | 83.3 | 18.7 | 45.8 | 8.8 | 88.7 | 16.8 | 22.1 | 4.0 |
| AD-368001.1 | 29.4 | 4.5 | 61.2 | 16.5 | 48.7 | 11.6 | 68.7 | 11.5 | 64.4 | 20.2 |
| AD-385489.1 | 83.9 | 37.1 | 106.9 | 4.8 | 72.9 | 8.4 | 43.1 | 6.7 | 68.8 | 5.1 |
| AD-385490.1 | 98.4 | 16.6 | 79.4 | 2.5 | 107.3 | 15.3 | 70.8 | 10.2 | 41.9 | 16.4 |
| AD-385491.1 | 31.9 | 17.0 | 84.7 | 32.0 | 78.7 | 24.4 | 73.3 | 26.9 | 24.5 | 11.9 |
| AD-385513.1 | 18.9 | 0.5 | 60.1 | 10.2 | 45.6 | 10.9 | 46.7 | 6.7 | 32.3 | 7.7 |
| AD-385515.1 | 18.9 | 10.1 | 66.3 | 43.1 | 64.6 | 22.6 | 93.5 | 19.1 | 27.3 | 7.9 |
| AD-385521.1 | 15.4 | 2.1 | 65.7 | 28.4 | 60.1 | 10.7 | 81.4 | 19.1 | 21.1 | 10.5 |
| AD-385557.1 | 7.0 | 2.6 | 65.0 | 15.2 | 53.8 | 17.8 | 39.6 | 8.3 | 20.3 | 4.8 |
| AD-385589.1 | 43.0 | 7.7 | 75.9 | 5.9 | 96.6 | 38.9 | 73.2 | 9.8 | 37.5 | 5.4 |
| AD-385590.1 | 20.9 | 1.0 | 107.6 | 40.8 | 70.6 | 12.4 | 48.3 | 4.2 | 27.3 | 7.6 |
| AD-385601.1 | 88.7 | 28.6 | 86.4 | 20.9 | 91.9 | 16.3 | 77.1 | 11.3 | 91.3 | 9.9 |
| AD-385602.1 | 66.8 | 15.6 | 95.5 | 16.9 | 107.7 | 28.1 | 88.7 | 16.2 | 57.2 | 9.1 |
| AD-385603.1 | 71.0 | 34.0 | 87.1 | 3.3 | 93.4 | 9.0 | 45.8 | 8.9 | 27.6 | 9.0 |
| AD-385640.1 | 48.1 | 10.2 | 80.8 | 25.0 | 68.7 | 21.9 | 80.5 | 28.7 | 40.8 | 11.5 |
| AD-385641.1 | 30.0 | 11.9 | 57.9 | 11.7 | 82.5 | 12.3 | 72.7 | 11.4 | 33.2 | 3.7 |
| AD-385641.2 | 22.9 | 2.8 | 76.4 | 2.0 | 87.5 | 17.9 | 97.5 | 27.8 | 32.0 | 5.5 |
| AD-385660.1 | 63.4 | 19.9 | 98.0 | 21.6 | 91.1 | 5.3 | 45.0 | 10.3 | 49.4 | 13.5 |
| AD-385662.1 | 66.3 | 6.0 | 85.5 | 34.7 | 80.3 | 18.7 | 52.2 | 11.5 | 21.0 | 1.4 |
| AD-385671.1 | 58.7 | 8.8 | 100.8 | 21.3 | 57.8 | 11.0 | 45.2 | 10.0 | 21.3 | 7.5 |
| AD-385675.1 | 63.0 | 33.3 | 85.2 | 28.2 | 96.8 | 21.3 | 69.2 | 17.0 | 37.1 | 6.7 |
| AD-385676.1 | 59.1 | 0.4 | 93.0 | 29.2 | 96.8 | 29.2 | 72.9 | 13.4 | 56.9 | 10.8 |
| AD-385677.1 | 119.4 | 18.1 | 115.6 | 39.4 | 95.9 | 24.4 | 39.7 | 3.9 | 48.2 | 8.5 |
| AD-385678.1 | 56.8 | 5.9 | 102.3 | 10.5 | 73.5 | 17.3 | 113.6 | 15.6 | 26.0 | 4.8 |
| AD-385679.1 | 49.2 | 20.0 | 75.5 | 22.0 | 93.1 | 29.6 | 76.2 | 11.0 | 51.9 | 11.2 |
| AD-385680.1 | 86.6 | 27.5 | 93.3 | 23.8 | 77.8 | 14.1 | 37.5 | 6.8 | 38.9 | 8.1 |
| AD-385681.1 | 47.5 | 18.4 | 80.7 | 5.6 | 93.0 | 16.4 | 81.8 | 13.1 | 23.3 | 2.8 |
| AD-385834.1 | 48.1 | 24.1 | 78.1 | 29.3 | 61.8 | 10.2 | 111.0 | 30.4 | 32.0 | 8.5 |
| AD-385889.1 | 68.8 | 29.9 | 86.4 | 16.9 | 94.8 | 25.0 | 76.7 | 11.0 | 32.8 | 2.0 |
| AD-385917.1 | 72.5 | 33.0 | 80.4 | 17.9 | 81.5 | 21.5 | 48.4 | 9.7 | 24.7 | 5.2 |
| AD-385918.1 | 99.9 | 14.4 | 87.6 | 28.5 | 58.8 | 4.4 | 49.9 | 12.7 | 56.6 | 3.6 |
| AD-385919.1 | 67.7 | 21.8 | 80.1 | 16.8 | 87.3 | 35.3 | 78.8 | 26.2 | 17.3 | 2.4 |
| AD-385920.1 | 54.8 | 28.4 | 103.1 | 2.3 | 92.0 | 26.7 | 74.6 | 28.9 | 31.6 | 3.7 |
| AD-386134.1 | 51.0 | 16.3 | 67.7 | 18.5 | 68.0 | 3.0 | 92.7 | 23.8 | 40.6 | 8.1 |
| AD-386135.1 | 49.4 | 9.9 | 74.7 | 22.1 | 63.0 | 11.7 | 93.6 | 30.4 | 35.4 | 6.7 |
| AD-386136.1 | 30.2 | 9.0 | 75.8 | 10.9 | 48.0 | 13.0 | 86.2 | 8.3 | 23.8 | 5.8 |
| AD-386136.2 | 44.5 | 6.4 | 77.3 | 2.6 | 51.8 | 8.3 | 121.7 | 17.9 | 35.7 | 1.9 |
| AD-386137.1 | 58.5 | 2.4 | 106.9 | 28.9 | 63.1 | 5.9 | 62.7 | 9.9 | 57.9 | 10.0 |
| AD-386137.2 | 70.7 | 3.6 | 74.0 | 5.2 | 66.0 | 14.0 | 83.5 | 5.4 | 66.6 | 5.9 |
| AD-386149.1 | 61.7 | 35.8 | 74.6 | 14.1 | 64.3 | 7.1 | 121.2 | 14.5 | 33.6 | 3.0 |
| AD-386150.1 | 66.0 | 23.4 | 76.0 | 2.2 | 83.9 | 23.7 | 114.3 | 33.0 | 35.3 | 6.1 |
| AD-386254.1 | 58.3 | 9.9 | 77.3 | 28.1 | 47.7 | 13.7 | 43.4 | 2.9 | 20.5 | 3.6 |
| AD-386255.1 | 69.8 | 11.6 | 66.4 | 10.9 | 81.6 | 25.6 | 91.6 | 11.0 | 64.2 | 11.7 |
| AD-386256.1 | 104.2 | 24.5 | 76.7 | 18.0 | 44.0 | 15.3 | 41.4 | 11.9 | 50.0 | 9.9 |
| AD-386498.1 | 44.6 | 11.2 | 116.4 | 38.3 | 92.1 | 36.4 | 82.3 | 22.2 | 26.4 | 6.3 |
| AD-386499.1 | 62.9 | 7.6 | 118.1 | 31.2 | 61.6 | 16.2 | 102.9 | 13.3 | 45.5 | 3.4 |
| AD-386500.1 | 49.5 | 2.1 | 80.2 | 18.3 | 87.5 | 20.7 | 81.6 | 6.8 | 35.5 | 6.3 |
| AD-386501.1 | 46.2 | 25.0 | 80.4 | 33.1 | 48.3 | 20.9 | 71.4 | 16.2 | 24.9 | 2.6 |
| AD-386502.1 | 64.9 | 14.8 | 122.2 | 17.9 | 76.4 | 23.0 | 69.7 | 16.1 | 85.5 | 7.3 |
| AD-386503.1 | 70.6 | 13.4 | 74.8 | 13.5 | 127.4 | 41.8 | 70.6 | 6.8 | 103.7 | 13.6 |
| AD-386504.1 | 51.8 | 26.6 | 92.5 | 20.7 | 50.2 | 7.5 | 59.5 | 22.5 | 18.2 | 3.2 |
| AD-386505.1 | 32.3 | 1.0 | 64.9 | 15.3 | 75.8 | 14.1 | 63.6 | 16.6 | 25.2 | 5.6 |
| AD-386506.1 | 49.4 | 13.7 | 91.9 | 17.5 | 88.9 | 15.1 | 69.4 | 6.6 | 44.2 | 8.1 |
| AD-386507.1 | 73.9 | 19.8 | 81.4 | 22.6 | 104.4 | 13.3 | 82.6 | 29.6 | 55.3 | 6.2 |
| AD-386508.1 | 57.5 | 20.7 | 79.7 | 31.0 | 86.2 | 15.7 | 49.7 | 11.9 | 30.9 | 6.1 |
| AD-386509.1 | 31.0 | 6.8 | 71.5 | 11.8 | 68.3 | 17.0 | 63.0 | 7.0 | 24.2 | 3.9 |
| AD-386595.1 | 47.9 | 18.6 | 83.8 | 26.7 | 62.3 | 6.0 | 122.8 | 32.8 | 33.0 | 5.2 |
| AD-386596.1 | 77.6 | 28.2 | 81.0 | 6.0 | 75.7 | 13.9 | 80.0 | 19.6 | 44.2 | 6.2 |
| AD-386617.1 | 68.1 | 22.4 | 100.4 | 28.8 | 91.9 | 10.7 | 149.3 | 33.4 | 52.0 | 11.3 |
| AD-386618.1 | 38.5 | 7.7 | 64.2 | 17.2 | 50.9 | 19.1 | 95.8 | 33.2 | 23.6 | 1.6 |
| AD-386619.1 | 20.3 | 4.1 | 105.5 | 45.9 | 54.0 | 23.4 | 70.2 | 16.7 | 31.1 | 5.7 |
| AD-386619.2 | 38.1 | 8.5 | 73.1 | 22.4 | 71.4 | 24.2 | 127.8 | 40.5 | 43.3 | 3.1 |
| AD-386620.1 | 41.8 | 12.1 | 96.8 | 21.5 | 52.3 | 4.1 | 75.0 | 25.0 | 23.4 | 2.9 |
| AD-386621.1 | 67.4 | 3.7 | 65.9 | 23.6 | 92.7 | 20.0 | 51.6 | 17.6 | 23.2 | 4.7 |
| AD-386622.1 | 46.3 | 10.6 | 79.9 | 22.6 | 64.1 | 14.6 | 57.4 | 7.6 | 52.9 | 6.4 |
| AD-386623.1 | 26.0 | 5.5 | 69.7 | 6.2 | 36.0 | 7.6 | 61.6 | 2.6 | 10.5 | 1.1 |
| AD-386624.1 | 34.3 | 9.2 | 87.1 | 13.5 | 56.8 | 19.0 | 78.1 | 12.1 | 25.2 | 3.5 |
| AD-386625.1 | 35.5 | 12.6 | 85.3 | 22.6 | 80.8 | 55.7 | 70.4 | 7.4 | 32.0 | 4.1 |
| AD-386626.1 | 68.9 | 14.2 | 70.9 | 11.0 | 81.1 | 15.9 | 70.7 | 10.1 | 32.8 | 5.9 |
| AD-386647.1 | 70.0 | 19.5 | 97.7 | 31.3 | 118.1 | 21.9 | 75.3 | 15.6 | 19.5 | 4.2 |
| AD-386848.1 | 105.1 | 14.6 | 105.7 | 53.6 | 48.2 | 15.4 | 44.7 | 9.6 | 32.3 | 8.8 |
| AD-386851.1 | 73.1 | 18.1 | 114.8 | 13.6 | 96.9 | 7.6 | 89.6 | 12.3 | 67.7 | 8.7 |
| AD-386852.1 | 114.7 | 42.8 | 85.9 | 41.8 | 53.7 | 16.3 | 40.7 | 11.4 | 24.6 | 3.5 |
| AD-386853.1 | 53.2 | 22.0 | 119.7 | 7.4 | 137.3 | 43.7 | 85.5 | 10.8 | 35.3 | 8.3 |
| AD-386860.1 | 86.5 | 29.3 | 78.4 | 14.7 | 137.7 | 27.0 | 90.2 | 10.8 | 82.6 | 11.9 |
| AD-386861.1 | 75.9 | 5.7 | 108.9 | 19.4 | 66.8 | 8.2 | 39.8 | 5.6 | 26.2 | 2.4 |
| AD-386867.1 | 59.2 | 8.0 | 59.4 | 12.4 | 116.0 | 66.6 | 79.3 | 26.3 | 25.6 | 5.4 |
| AD-386868.1 | 73.0 | 4.1 | 78.7 | 19.0 | 68.8 | 8.3 | 46.1 | 13.4 | 41.7 | 3.5 |
| AD-387208.1 | 66.5 | 16.1 | 87.3 | 13.4 | 98.0 | 30.6 | 94.0 | 20.8 | 51.2 | 14.8 |
| AD-387209.1 | 48.6 | 2.4 | 82.9 | 7.1 | 87.4 | 20.1 | 66.1 | 14.6 | 83.8 | 9.9 |
| AD-387213.1 | 113.2 | 20.6 | 73.8 | 16.9 | 78.4 | 15.7 | 54.1 | 2.5 | 72.9 | 19.6 |
| AD-387214.1 | 89.8 | 39.2 | 83.3 | 15.5 | 68.6 | 14.5 | 53.4 | 3.0 | 58.9 | 8.1 |
| AD-387303.1 | 79.9 | 25.9 | 71.8 | 16.2 | 154.8 | 34.6 | 93.7 | 16.7 | 102.5 | 16.2 |
| AD-387636.1 | 66.0 | 30.9 | 109.0 | 20.2 | 53.3 | 12.7 | 45.6 | 15.9 | 14.0 | 4.5 |
| AD-387638.1 | 20.5 | 16.4 | 119.6 | 48.8 | 41.7 | 4.6 | 54.4 | 25.2 | 15.3 | 4.5 |
| AD-387640.1 | 52.5 | 1.7 | 99.8 | 23.5 | 81.4 | 11.9 | 81.7 | 26.5 | 35.7 | 5.0 |
| AD-387641.1 | 62.1 | 5.2 | 102.2 | 32.0 | 76.0 | 17.0 | 72.8 | 14.7 | 20.3 | 5.4 |
| AD-387777.1 | 43.4 | 17.4 | 93.8 | 22.6 | 47.5 | 6.9 | 107.9 | 18.8 | 25.1 | 7.2 |
| AD-387779.1 | 15.0 | 6.1 | 77.5 | 28.8 | 43.0 | 8.3 | 57.6 | 15.9 | 18.7 | 6.0 |
| AD-387780.1 | 16.9 | 1.5 | 60.1 | 39.4 | 63.2 | 17.3 | 84.1 | 12.5 | 21.8 | 5.9 |
| AD-387780.2 | 18.0 | 22.2 | 59.6 | 9.5 | 73.5 | 22.9 | 58.6 | 15.3 | 24.1 | 1.4 |
| AD-387806.1 | 87.6 | 5.1 | 130.7 | 20.4 | 47.1 | 7.6 | 39.6 | 9.3 | 19.9 | 1.2 |
| AD-387812.1 | 26.1 | 5.9 | 64.2 | 19.1 | 53.5 | 8.5 | 52.4 | 6.7 | 19.7 | 2.6 |
| AD-387812.2 | 34.2 | 7.1 | 76.7 | 3.0 | 85.2 | 27.8 | 85.5 | 25.2 | 24.9 | 1.8 |
| AD-387813.1 | 43.4 | 12.1 | 111.2 | 0.4 | 65.6 | 19.9 | 71.5 | 21.9 | 35.1 | 9.8 |
| AD-387825.1 | 19.0 | 1.6 | 72.0 | 25.9 | 64.7 | 10.5 | 83.3 | 33.5 | 26.3 | 3.6 |
| AD-387830.1 | 70.4 | 24.7 | 83.0 | 5.7 | 47.2 | 11.3 | 107.6 | 33.3 | 35.4 | 6.1 |
| AD-387831.1 | 18.7 | 5.9 | 117.2 | 21.8 | 46.1 | 8.9 | 42.9 | 3.9 | 20.1 | 3.9 |
| AD-387833.1 | 39.3 | 0.8 | 75.4 | 19.3 | 47.2 | 22.5 | 75.3 | 5.1 | 23.4 | 5.2 |
| AD-387840.1 | 44.1 | 8.5 | 101.9 | 23.7 | 37.9 | 10.2 | 46.6 | 8.4 | 13.3 | 3.2 |
| AD-387842.1 | 50.8 | 12.8 | 89.3 | 18.3 | 84.5 | 14.8 | 98.1 | 13.0 | 40.1 | 7.7 |
| AD-387845.1 | 40.7 | 15.1 | 98.0 | 20.5 | 79.2 | 23.0 | 46.2 | 7.8 | 42.2 | 3.4 |
| AD-387846.1 | 19.6 | 2.3 | 99.7 | 27.6 | 58.2 | 20.7 | 110.5 | 20.7 | 25.7 | 5.1 |
| AD-387858.1 | 52.2 | 5.2 | 108.0 | 44.2 | 56.2 | 11.9 | 40.7 | 4.9 | 23.4 | 5.4 |
| AD-387861.1 | 75.9 | 13.6 | 95.5 | 12.2 | 92.3 | 21.2 | 74.5 | 18.0 | 46.5 | 4.0 |
| AD-387863.1 | 31.3 | 15.2 | 49.8 | 9.1 | 57.9 | 9.8 | 86.4 | 26.4 | 27.4 | 2.6 |
| AD-387865.1 | 48.5 | 11.2 | 102.0 | 9.9 | 84.4 | 20.4 | 42.1 | 3.4 | 30.8 | 5.3 |
| AD-387866.1 | 13.4 | 3.3 | 80.4 | 39.4 | 46.9 | 11.7 | 68.0 | 11.4 | 11.1 | 4.8 |
| AD-387869.1 | 59.4 | 48.3 | 90.2 | 5.4 | 67.1 | 9.7 | 41.3 | 6.8 | 68.5 | 7.5 |
| AD-387871.1 | 88.1 | 35.5 | 97.3 | 33.7 | 82.1 | 12.6 | 40.4 | 5.8 | 12.9 | 3.6 |
| AD-387875.1 | 79.9 | 9.3 | 95.4 | 26.2 | 80.7 | 18.3 | 54.2 | 7.8 | 19.0 | 3.6 |
| AD-387878.1 | 41.3 | 22.1 | 86.3 | 39.4 | 106.0 | 35.1 | 68.3 | 10.6 | 25.5 | 3.6 |
| AD-387880.1 | 62.9 | 2.4 | 92.7 | 12.3 | 80.6 | 15.0 | 90.7 | 21.9 | 16.4 | 4.1 |
| AD-387881.1 | 49.6 | 24.2 | 118.0 | 22.0 | 112.2 | 35.3 | 86.8 | 22.7 | 22.6 | 3.7 |
| AD-387882.1 | 54.2 | 35.2 | 110.6 | 5.1 | 84.4 | 20.2 | 86.9 | 21.7 | 24.3 | 3.7 |
| AD-387909.1 | 43.3 | 11.4 | 111.7 | 35.0 | 63.8 | 16.6 | 39.7 | 5.9 | 18.0 | 3.5 |
| AD-387937.1 | 69.1 | 32.4 | 79.6 | 23.7 | 78.6 | 13.9 | 80.3 | 22.0 | 35.1 | 7.2 |
| AD-387940.1 | 84.8 | 18.9 | 92.7 | 5.3 | 85.4 | 23.4 | 93.1 | 13.1 | 30.6 | 9.5 |
| AD-387941.1 | 62.2 | 19.8 | 68.4 | 19.4 | 73.0 | 15.5 | 86.8 | 9.8 | 19.4 | 2.4 |
| AD-387942.1 | 61.3 | 2.8 | 58.2 | 9.1 | 97.8 | 15.0 | 71.0 | 25.1 | 35.0 | 6.6 |
| AD-387944.1 | 48.0 | 9.4 | 67.7 | 2.2 | 70.3 | 22.1 | 60.0 | 1.6 | 24.4 | 5.9 |
| AD-387945.1 | 69.3 | 0.1 | 66.6 | 8.2 | 83.0 | 14.4 | 52.3 | 3.5 | 38.7 | 10.1 |
| AD-387947.1 | 59 | 16 | 80 | 31 | 63 | 17 | 94 | 8 | 37 | 7 |

| Sample | Neuro-2A 0.1 nM | STDEV | hep3B 10 nM | STDEV | hep3B 0.1 nM | STDEV |
|---|---|---|---|---|---|---|
| AD-364136.1 | 73.1 | 20.7 | 100.8 | 18.0 | 89.8 | 16.5 |
| AD-364137.1 | 85.2 | 9.5 | 107.3 | 15.7 | 117.6 | 29.8 |
| AD-364138.1 | 103.6 | 15.0 | 100.9 | 30.0 | 102.7 | 35.9 |
| AD-365055.1 | 47.2 | 11.9 | 65.3 | 19.9 | 94.4 | 12.8 |
| AD-365056.1 | 70.7 | 8.8 | 60.2 | 20.4 | 104.6 | 27.8 |
| AD-365144.1 | 67.7 | 7.4 | 49.4 | 3.1 | 89.9 | 9.4 |
| AD-365747.1 | 68.2 | 6.9 | 48.2 | 15.5 | 97.4 | 22.3 |
| AD-365748.1 | 67.9 | 23.7 | 38.5 | 11.2 | 89.9 | 11.1 |
| AD-365749.1 | 85.9 | 14.8 | 64.5 | 11.0 | 91.4 | 19.1 |
| AD-365750.1 | 24.5 | 4.5 | 57.1 | 6.4 | 105.8 | 19.6 |
| AD-365751.1 | 99.2 | 2.1 | 73.7 | 10.2 | 96.9 | 11.9 |
| AD-365752.1 | 64.1 | 5.1 | 55.7 | 16.4 | 103.5 | 13.3 |
| AD-365753.1 | 36.0 | 2.8 | 61.1 | 18.2 | 94.9 | 10.6 |
| AD-365754.1 | 89.4 | 7.3 | 66.9 | 27.7 | 104.8 | 13.9 |
| AD-365757.1 | 74.5 | 6.7 | 48.4 | 16.1 | 85.8 | 16.8 |
| AD-365784.1 | 93.4 | 14.8 | 52.6 | 17.8 | 86.0 | 15.3 |
| AD-365785.1 | 81.8 | 5.6 | 107.7 | 17.9 | 96.0 | 24.9 |
| AD-365915.1 | 67.8 | 4.7 | 45.0 | 9.9 | 84.0 | 17.2 |
| AD-365916.1 | 61.3 | 7.2 | 46.3 | 12.1 | 82.7 | 17.2 |
| AD-365918.1 | 83.4 | 19.1 | 93.0 | 16.5 | 100.3 | 15.2 |
| AD-366362.1 | 77.6 | 6.4 | 89.2 | 17.9 | 128.0 | 4.8 |
| AD-366363.1 | 79.2 | 6.1 | 41.8 | 16.4 | 76.6 | 12.1 |
| AD-366364.1 | 65.6 | 8.8 | 57.7 | 13.1 | 103.9 | 24.8 |
| AD-366365.1 | 66.8 | 10.0 | 74.5 | 14.4 | 86.6 | 17.0 |
| AD-366366.1 | 69.9 | 8.3 | 31.9 | 13.3 | 73.0 | 19.1 |
| AD-366367.1 | 87.6 | 9.7 | 34.5 | 6.7 | 86.6 | 16.9 |
| AD-366368.1 | 70.7 | 3.4 | 78.4 | 15.1 | 102.6 | 23.3 |
| AD-366369.1 | 71.5 | 7.7 | 47.9 | 9.2 | 67.8 | 22.1 |
| AD-366772.1 | 78.1 | 3.4 | 68.2 | 5.3 | 100.4 | 23.1 |
| AD-366815.1 | 81.1 | 16.5 | 103.2 | 22.2 | 114.4 | 20.2 |
| AD-366818.1 | 66.0 | 20.0 | 95.3 | 21.4 | 94.9 | 14.2 |
| AD-366819.1 | 76.1 | 19.7 | 107.3 | 20.6 | 98.5 | 15.6 |
| AD-366820.1 | 77.7 | 9.3 | 78.2 | 19.0 | 92.4 | 23.4 |
| AD-366822.1 | 71.5 | 6.0 | 108.9 | 41.4 | 113.7 | 10.8 |
| AD-367069.1 | 77.3 | 8.5 | 80.6 | 15.7 | 103.9 | 3.3 |
| AD-367071.1 | 64.7 | 8.8 | 86.9 | 16.3 | 98.7 | 16.6 |
| AD-367098.1 | 86.9 | 16.0 | 98.2 | 32.0 | 82.7 | 9.2 |
| AD-367101.1 | 74.3 | 4.9 | 73.6 | 6.2 | 101.8 | 12.0 |
| AD-367102.1 | 69.9 | 4.8 | 83.0 | 21.8 | 89.9 | 4.7 |
| AD-367103.1 | 87.0 | 11.1 | 86.5 | 23.1 | 100.2 | 22.4 |
| AD-367104.1 | 101.9 | 15.5 | 61.5 | 13.8 | 116.7 | 13.7 |
| AD-367105.1 | 99.3 | 10.2 | 100.1 | 20.8 | 91.4 | 1.4 |
| AD-367106.1 | 76.2 | 10.7 | 102.6 | 17.0 | 99.9 | 23.5 |
| AD-367107.1 | 73.2 | 8.9 | 100.2 | 21.9 | 141.8 | 34.5 |
| AD-367108.1 | 67.2 | 9.9 | 75.7 | 7.3 | 108.9 | 13.4 |
| AD-367438.1 | 63.7 | 19.5 | 72.4 | 13.0 | 115.9 | 19.1 |
| AD-367439.1 | 62.9 | 5.3 | 77.8 | 20.4 | 86.7 | 19.4 |
| AD-367440.1 | 54.9 | 16.1 | 87.1 | 16.8 | 99.3 | 23.9 |
| AD-367448.1 | 119.1 | 13.6 | 133.3 | 30.3 | 119.6 | 20.9 |
| AD-367448.2 | 58.6 | 4.7 | 89.0 | 14.5 | 96.8 | 11.8 |
| AD-367451.1 | 72.4 | 3.7 | 68.8 | 5.8 | 90.0 | 19.2 |
| AD-367453.1 | 88.3 | 5.1 | 100.5 | 16.8 | 106.9 | 3.0 |
| AD-367453.2 | 61.4 | 15.3 | 74.0 | 16.7 | 90.8 | 20.2 |
| AD-367454.1 | 60.4 | 5.5 | 62.0 | 9.2 | 88.8 | 10.1 |
| AD-367456.1 | 87.5 | 15.7 | 95.7 | 22.4 | 123.9 | 23.2 |
| AD-367477.1 | 96.1 | 15.1 | 95.6 | 7.2 | 74.6 | 19.7 |
| AD-367480.1 | 92.6 | 27.9 | 112.5 | 29.9 | 110.6 | 10.6 |
| AD-367482.1 | 64.0 | 2.8 | 84.6 | 22.9 | 114.7 | 17.4 |
| AD-367483.1 | 71.5 | 16.3 | 81.3 | 11.1 | 99.7 | 15.3 |
| AD-367486.1 | 70.1 | 21.6 | 115.6 | 28.3 | 92.0 | 7.6 |
| AD-367487.1 | 69.0 | 9.8 | 92.6 | 24.6 | 108.5 | 9.8 |
| AD-367513.1 | 76.7 | 13.4 | 94.8 | 28.6 | 107.3 | 9.2 |
| AD-367530.1 | 100.3 | 9.3 | 116.0 | 34.0 | 122.1 | 14.8 |
| AD-367532.1 | 94.9 | 10.1 | 98.9 | 15.3 | 101.1 | 7.0 |
| AD-367571.1 | 60.9 | 25.8 | 93.1 | 21.4 | 81.9 | 8.8 |
| AD-367572.1 | 94.1 | 9.3 | 138.8 | 23.1 | 91.7 | 12.6 |
| AD-367573.1 | 51.1 | 5.7 | 107.1 | 20.4 | 88.2 | 18.4 |
| AD-367575.1 | 71.6 | 25.2 | 92.2 | 19.4 | 93.4 | 9.9 |
| AD-367577.1 | 75.9 | 6.4 | 92.2 | 20.1 | 104.8 | 15.5 |
| AD-367630.1 | 99.4 | 18.1 | 57.0 | 10.5 | 105.4 | 14.3 |
| AD-367632.1 | 91.3 | 12.7 | 83.9 | 17.2 | 120.9 | 11.6 |
| AD-367633.1 | 81.1 | 8.1 | 84.0 | 22.3 | 97.9 | 19.7 |
| AD-367636.1 | 77.6 | 8.7 | 99.2 | 16.5 | 91.4 | 8.8 |
| AD-367646.1 | 86.7 | 7.6 | 69.4 | 15.9 | 95.4 | 13.4 |
| AD-367685.1 | 83.2 | 4.7 | 100.1 | 11.2 | 80.4 | 16.8 |
| AD-367688.1 | 74.1 | 27.8 | 69.8 | 16.3 | 97.6 | 7.5 |
| AD-367690.1 | 52.2 | 16.2 | 92.7 | 19.3 | 104.5 | 14.2 |
| AD-367691.1 | 61.7 | 16.2 | 86.2 | 15.2 | 115.1 | 9.4 |
| AD-367694.1 | 103.2 | 14.9 | 67.4 | 17.6 | 87.2 | 14.6 |
| AD-367696.1 | 65.4 | 8.0 | 81.9 | 25.4 | 102.9 | 14.3 |
| AD-367697.1 | 100.4 | 2.8 | 56.6 | 4.3 | 80.4 | 11.5 |
| AD-367698.1 | 97.7 | 22.6 | 88.5 | 18.8 | 94.8 | 12.6 |
| AD-367699.1 | 99.6 | 3.9 | 82.1 | 11.9 | 102.2 | 9.8 |
| AD-367704.1 | 97.1 | 8.7 | 62.4 | 8.1 | 71.4 | 20.1 |
| AD-367705.1 | 54.0 | 14.0 | 52.8 | 12.0 | 111.7 | 22.2 |
| AD-367706.1 | 69.8 | 10.2 | 77.1 | 20.7 | 93.0 | 11.8 |
| AD-367707.1 | 61.5 | 3.8 | 49.7 | 15.3 | 99.0 | 18.1 |
| AD-367708.1 | 64.6 | 13.9 | 76.6 | 8.5 | 88.3 | 16.3 |
| AD-367709.1 | 66.2 | 9.6 | 46.3 | 2.9 | 90.9 | 30.2 |
| AD-367713.1 | 60.8 | 6.5 | 69.6 | 18.2 | 103.7 | 15.7 |
| AD-367718.1 | 57.6 | 25.6 | 78.4 | 17.6 | 82.2 | 7.3 |
| AD-367745.1 | 66.0 | 25.0 | 85.2 | 6.5 | 105.3 | 11.7 |
| AD-367746.1 | 78.7 | 9.7 | 101.5 | 28.1 | 83.2 | 8.5 |
| AD-367755.1 | 92.8 | 13.6 | 86.0 | 19.4 | 103.6 | 7.0 |
| AD-367792.1 | 74.4 | 11.8 | 99.3 | 17.1 | 107.4 | 19.5 |
| AD-367794.1 | 37.4 | 13.2 | 51.1 | 18.4 | 101.1 | 26.4 |
| AD-367795.1 | 86.9 | 6.0 | 65.0 | 9.6 | 109.3 | 18.0 |
| AD-367796.1 | 71.0 | 13.6 | 62.5 | 24.5 | 71.0 | 13.7 |
| AD-367797.1 | 46.9 | 6.0 | 36.6 | 6.4 | 87.5 | 18.7 |
| AD-367801.1 | 75.4 | 14.5 | 80.5 | 11.8 | 113.4 | 20.8 |
| AD-367802.1 | 60.1 | 13.7 | 86.9 | 21.7 | 92.4 | 33.4 |
| AD-367805.1 | 91.5 | 4.8 | 59.9 | 10.6 | 133.6 | 9.2 |
| AD-367809.1 | 38.0 | 5.7 | 54.1 | 17.5 | 102.1 | 11.1 |
| AD-367815.1 | 40.2 | 3.4 | 53.5 | 14.1 | 78.9 | 9.6 |
| AD-367816.1 | 66.6 | 7.0 | 63.3 | 11.0 | 94.6 | 26.1 |
| AD-367816.2 | 68.1 | 9.8 | 69.2 | 16.8 | 116.0 | 10.1 |
| AD-367817.1 | 90.6 | 8.2 | 54.4 | 4.0 | 106.3 | 10.1 |
| AD-367818.1 | 56.6 | 3.2 | 45.6 | 10.7 | 110.9 | 13.7 |
| AD-367819.1 | 57.9 | 9.9 | 80.7 | 12.0 | 95.6 | 16.0 |
| AD-367819.2 | 68.0 | 3.2 | 79.3 | 14.9 | 90.0 | 3.8 |
| AD-367820.1 | 64.1 | 10.6 | 57.2 | 4.0 | 69.0 | 17.8 |
| AD-367821.1 | 68.8 | 15.7 | 86.5 | 29.8 | 92.0 | 3.5 |
| AD-367822.1 | 70.9 | 3.2 | 88.5 | 22.0 | 103.5 | 24.1 |
| AD-367826.1 | 82.2 | 4.9 | 70.3 | 23.8 | 114.0 | 29.1 |
| AD-367832.1 | 73.9 | 4.3 | 71.4 | 18.2 | 105.5 | 15.7 |
| AD-367844.1 | 90.5 | 12.2 | 115.1 | 32.9 | 97.2 | 18.9 |
| AD-367845.1 | 56.0 | 4.0 | 59.1 | 12.7 | 89.0 | 5.2 |
| AD-367846.1 | 79.1 | 7.5 | 49.8 | 10.7 | 103.6 | 14.5 |
| AD-367850.1 | 39.9 | 6.8 | 42.3 | 9.7 | 68.4 | 9.4 |
| AD-367851.1 | 49.9 | 4.7 | 59.5 | 18.0 | 91.9 | 13.1 |
| AD-367853.1 | 52.1 | 5.5 | 52.4 | 14.7 | 102.8 | 20.6 |
| AD-367872.1 | 76.1 | 7.4 | 78.8 | 30.2 | 104.4 | 10.9 |
| AD-367873.1 | 71.1 | 6.6 | 79.3 | 10.7 | 108.4 | 7.6 |
| AD-367875.1 | 81.2 | 10.9 | 75.1 | 24.2 | 88.4 | 11.4 |
| AD-367876.1 | 57.0 | 8.1 | 92.1 | 17.3 | 116.0 | 18.3 |
| AD-367877.1 | 77.3 | 16.8 | 61.7 | 8.5 | 108.6 | 30.2 |
| AD-367878.1 | 86.6 | 8.5 | 68.2 | 12.5 | 98.0 | 16.1 |
| AD-367878.2 | 69.6 | 8.5 | 51.7 | 14.9 | 94.1 | 8.8 |
| AD-367902.1 | 85.2 | 9.1 | 123.4 | 16.9 | 83.1 | 22.8 |
| AD-367903.1 | 75.4 | 6.8 | 117.9 | 17.9 | 118.2 | 23.2 |
| AD-367904.1 | 105.0 | 12.6 | 104.5 | 30.3 | 118.4 | 13.8 |
| AD-367905.1 | 65.0 | 11.5 | 80.1 | 21.0 | 114.6 | 23.6 |
| AD-367906.1 | 50.9 | 8.7 | 82.9 | 23.1 | 102.5 | 13.8 |
| AD-367907.1 | 54.0 | 10.0 | 109.1 | 13.3 | 103.5 | 19.4 |
| AD-367908.1 | 81.9 | 12.2 | 108.4 | 25.1 | 103.0 | 15.0 |
| AD-367909.1 | 87.2 | 13.5 | 116.4 | 18.1 | 100.9 | 20.2 |
| AD-367910.1 | 85.7 | 20.7 | 108.7 | 16.8 | 107.2 | 21.2 |
| AD-367911.1 | 89.0 | 9.7 | 79.9 | 20.7 | 109.7 | 7.9 |
| AD-367912.1 | 97.4 | 12.6 | 113.0 | 24.1 | 123.7 | 14.2 |
| AD-367913.1 | 92.0 | 21.2 | 104.3 | 9.5 | 116.1 | 13.1 |
| AD-367914.1 | 88.9 | 7.3 | 96.1 | 11.6 | 111.5 | 12.1 |
| AD-367915.1 | 97.8 | 11.8 | 107.2 | 29.8 | 117.8 | 8.0 |
| AD-367916.1 | 59.3 | 17.5 | 104.5 | 10.9 | 120.5 | 17.0 |
| AD-367917.1 | 52.2 | 2.5 | 64.4 | 22.1 | 105.6 | 12.8 |
| AD-367918.1 | 54.3 | 6.6 | 65.3 | 10.6 | 95.3 | 30.3 |
| AD-367925.1 | 54.0 | 3.5 | 82.9 | 9.5 | 101.1 | 13.4 |
| AD-367950.1 | 66.5 | 17.4 | 70.0 | 3.3 | 86.2 | 12.3 |
| AD-367967.1 | 56.3 | 9.1 | 49.9 | 12.2 | 75.7 | 14.0 |
| AD-367968.1 | 81.2 | 11.3 | 73.5 | 16.3 | 100.9 | 21.7 |
| AD-367972.1 | 90.7 | 12.7 | 85.2 | 13.4 | 90.4 | 6.6 |
| AD-367973.1 | 81.2 | 12.8 | 92.3 | 19.7 | 91.6 | 10.3 |
| AD-367982.1 | 82.6 | 6.6 | 62.3 | 10.0 | 116.9 | 15.8 |
| AD-367984.1 | 56.5 | 6.9 | 43.4 | 13.7 | 86.1 | 13.0 |
| AD-368001.1 | 62.7 | 4.7 | 39.6 | 11.2 | 94.6 | 12.3 |
| AD-385489.1 | 82.6 | 14.0 | 146.8 | 44.4 | 104.0 | 18.3 |
| AD-385490.1 | 107.9 | 11.2 | 76.4 | 4.8 | 103.9 | 9.0 |
| AD-385491.1 | 94.7 | 20.9 | 56.3 | 22.0 | 120.1 | 18.5 |
| AD-385513.1 | 89.8 | 5.3 | 66.1 | 16.3 | 115.4 | 28.7 |
| AD-385515.1 | 84.9 | 16.6 | 58.8 | 11.8 | 119.9 | 15.6 |
| AD-385521.1 | 65.7 | 11.5 | 54.8 | 9.6 | 113.9 | 13.1 |
| AD-385557.1 | 51.8 | 10.6 | 69.1 | 20.9 | 81.4 | 12.4 |
| AD-385589.1 | 87.0 | 6.0 | 73.1 | 10.5 | 103.9 | 14.0 |
| AD-385590.1 | 63.0 | 9.1 | 68.2 | 5.6 | 99.8 | 21.3 |
| AD-385601.1 | 95.8 | 7.6 | 109.5 | 4.5 | 102.8 | 15.6 |
| AD-385602.1 | 102.5 | 14.9 | 103.9 | 17.3 | 111.5 | 18.2 |
| AD-385603.1 | 70.2 | 8.9 | 106.0 | 10.9 | 90.5 | 10.5 |
| AD-385640.1 | 87.9 | 15.0 | 71.2 | 12.9 | 85.1 | 5.1 |
| AD-385641.1 | 71.8 | 4.8 | 74.8 | 22.5 | 115.1 | 13.3 |
| AD-385641.2 | 76.0 | 12.9 | 80.2 | 9.7 | 100.4 | 10.2 |
| AD-385660.1 | 62.1 | 9.9 | 129.4 | 42.1 | 115.5 | 23.6 |
| AD-385662.1 | 66.8 | 13.1 | 91.3 | 15.9 | 98.7 | 23.2 |
| AD-385671.1 | 37.1 | 7.2 | 97.0 | 22.2 | 109.8 | 13.7 |
| AD-385675.1 | 99.7 | 10.2 | 93.3 | 8.9 | 125.3 | 11.7 |
| AD-385676.1 | 95.6 | 31.0 | 98.2 | 12.7 | 136.8 | 25.0 |
| AD-385677.1 | 50.5 | 4.3 | 148.0 | 43.7 | 135.3 | 33.9 |
| AD-385678.1 | 60.7 | 15.1 | 113.0 | 17.7 | 138.8 | 26.2 |
| AD-385679.1 | 89.3 | 18.9 | 95.1 | 15.9 | 102.2 | 18.5 |
| AD-385680.1 | 63.2 | 7.1 | 126.0 | 12.5 | 130.0 | 21.2 |
| AD-385681.1 | 65.8 | 10.7 | 72.9 | 10.8 | 121.1 | 36.0 |
| AD-385834.1 | 84.5 | 5.8 | 89.0 | 14.3 | 102.1 | 6.8 |
| AD-385889.1 | 82.5 | 10.0 | 92.0 | 14.3 | 88.0 | 8.9 |
| AD-385917.1 | 50.2 | 5.9 | 125.1 | 16.3 | 108.3 | 21.1 |
| AD-385918.1 | 55.1 | 10.4 | 147.9 | 38.8 | 128.0 | 22.0 |
| AD-385919.1 | 49.2 | 6.2 | 99.4 | 8.5 | 121.2 | 6.3 |
| AD-385920.1 | 60.4 | 6.0 | 111.5 | 37.1 | 113.5 | 35.2 |
| AD-386134.1 | 82.2 | 10.0 | 78.4 | 21.8 | 94.0 | 6.7 |
| AD-386135.1 | 86.0 | 12.5 | 61.8 | 16.4 | 76.7 | 3.6 |
| AD-386136.1 | 75.9 | 8.8 | 45.7 | 9.3 | 131.4 | 24.5 |
| AD-386136.2 | 80.3 | 8.8 | 47.1 | 14.3 | 90.6 | 18.4 |
| AD-386137.1 | 83.9 | 12.9 | 81.0 | 14.3 | 127.2 | 27.0 |
| AD-386137.2 | 71.7 | 8.3 | 86.5 | 10.7 | 93.1 | 10.2 |
| AD-386149.1 | 77.8 | 7.2 | 90.8 | 21.9 | 101.2 | 19.6 |
| AD-386150.1 | 84.5 | 10.8 | 52.1 | 16.7 | 92.7 | 21.8 |
| AD-386254.1 | 54.5 | 7.9 | 88.1 | 26.1 | 106.6 | 16.8 |
| AD-386255.1 | 69.8 | 13.5 | 92.6 | 14.7 | 94.6 | 5.7 |
| AD-386256.1 | 67.4 | 7.3 | 118.3 | 22.9 | 113.0 | 13.3 |
| AD-386498.1 | 55.2 | 8.4 | 74.6 | 14.4 | 88.3 | 3.4 |
| AD-386499.1 | 64.2 | 14.3 | 101.8 | 19.6 | 97.8 | 18.0 |
| AD-386500.1 | 66.1 | 10.8 | 68.8 | 16.6 | 78.6 | 14.9 |
| AD-386501.1 | 65.8 | 10.7 | 62.7 | 5.9 | 113.1 | 12.9 |
| AD-386502.1 | 78.9 | 2.9 | 63.4 | 7.7 | 77.1 | 12.5 |
| AD-386503.1 | 69.9 | 9.1 | 90.9 | 16.8 | 123.3 | 20.0 |
| AD-386504.1 | 62.1 | 13.2 | 57.1 | 17.8 | 90.4 | 8.4 |
| AD-386505.1 | 48.3 | 12.1 | 81.5 | 27.7 | 98.1 | 15.5 |
| AD-386506.1 | 65.1 | 7.2 | 87.6 | 19.4 | 108.1 | 6.6 |
| AD-386507.1 | 83.7 | 20.3 | 93.4 | 14.1 | 124.6 | 14.2 |
| AD-386508.1 | 49.9 | 7.3 | 95.7 | 20.8 | 87.5 | 7.0 |
| AD-386509.1 | 55.9 | 10.0 | 100.8 | 27.4 | 66.8 | 13.6 |
| AD-386595.1 | 97.4 | 13.8 | 78.1 | 12.8 | 92.8 | 8.3 |
| AD-386596.1 | 86.6 | 12.7 | 62.9 | 15.0 | 107.3 | 20.6 |
| AD-386617.1 | 82.0 | 2.8 | 92.7 | 10.8 | 109.0 | 16.3 |
| AD-386618.1 | 91.9 | 31.7 | 46.6 | 13.1 | 90.7 | 18.7 |
| AD-386619.1 | 49.8 | 2.1 | 51.5 | 10.3 | 88.1 | 17.1 |
| AD-386619.2 | 72.0 | 6.2 | 60.6 | 8.2 | 106.8 | 9.9 |
| AD-386620.1 | 55.6 | 2.1 | 59.1 | 7.1 | 111.5 | 18.5 |
| AD-386621.1 | 49.2 | 7.2 | 85.2 | 13.8 | 95.8 | 32.1 |
| AD-386622.1 | 76.8 | 10.1 | 83.3 | 7.8 | 98.7 | 12.6 |
| AD-386623.1 | 55.7 | 12.9 | 36.3 | 11.1 | 83.9 | 8.3 |
| AD-386624.1 | 47.2 | 2.3 | 66.4 | 16.3 | 79.6 | 11.4 |
| AD-386625.1 | 70.8 | 13.0 | 88.8 | 12.1 | 137.3 | 23.1 |
| AD-386626.1 | 57.0 | 8.4 | 90.8 | 25.1 | 116.9 | 13.6 |
| AD-386647.1 | 60.9 | 8.7 | 76.3 | 17.5 | 116.8 | 29.0 |
| AD-386848.1 | 36.7 | 8.9 | 110.9 | 23.2 | 123.9 | 37.7 |
| AD-386851.1 | 106.4 | 14.4 | 82.1 | 8.1 | 107.4 | 18.6 |
| AD-386852.1 | 52.4 | 5.6 | 130.3 | 13.4 | 107.9 | 20.0 |
| AD-386853.1 | 113.8 | 15.3 | 107.2 | 2.5 | 99.5 | 7.4 |
| AD-386860.1 | 115.5 | 16.4 | 87.7 | 4.3 | 102.8 | 11.2 |
| AD-386861.1 | 49.3 | 7.0 | 177.9 | 32.5 | 132.3 | 17.7 |
| AD-386867.1 | 60.3 | 6.8 | 92.0 | 15.3 | 131.8 | 15.8 |
| AD-386868.1 | 69.8 | 9.6 | 146.1 | 21.1 | 136.0 | 40.5 |
| AD-387208.1 | 81.4 | 9.0 | 96.4 | 26.7 | 109.8 | 24.8 |
| AD-387209.1 | 99.5 | 23.3 | 112.6 | 10.2 | 122.5 | 20.9 |
| AD-387213.1 | 59.0 | 8.6 | 157.2 | 37.8 | 134.6 | 20.0 |
| AD-387214.1 | 66.2 | 10.8 | 134.7 | 21.7 | 109.7 | 6.6 |
| AD-387303.1 | 105.2 | 16.7 | 116.5 | 34.4 | 125.2 | 7.4 |
| AD-387636.1 | 40.6 | 5.8 | 62.6 | 14.0 | 100.1 | 16.7 |
| AD-387638.1 | 36.3 | 7.6 | 53.0 | 10.2 | 120.5 | 6.3 |
| AD-387640.1 | 75.8 | 21.0 | 71.0 | 12.8 | 100.0 | 6.9 |
| AD-387641.1 | 38.8 | 6.5 | 68.7 | 9.1 | 113.9 | 23.4 |
| AD-387777.1 | 71.2 | 10.8 | 65.1 | 12.6 | 88.2 | 7.1 |
| AD-387779.1 | 47.3 | 3.1 | 51.7 | 9.7 | 80.3 | 13.0 |
| AD-387780.1 | 58.0 | 8.6 | 46.7 | 12.7 | 116.9 | 13.8 |
| AD-387780.2 | 66.2 | 17.9 | 53.1 | 6.1 | 88.4 | 17.4 |
| AD-387806.1 | 39.5 | 7.3 | 131.4 | 31.7 | 114.3 | 13.7 |
| AD-387812.1 | 36.5 | 7.4 | 71.5 | 18.1 | 136.5 | 23.3 |
| AD-387812.2 | 53.5 | 3.2 | 74.0 | 11.3 | 93.6 | 14.5 |
| AD-387813.1 | 59.2 | 5.8 | 78.0 | 28.3 | 94.0 | 13.2 |
| AD-387825.1 | 62.7 | 12.8 | 54.7 | 11.7 | 117.5 | 14.4 |
| AD-387830.1 | 53.5 | 27.8 | 74.4 | 14.6 | 90.9 | 16.9 |
| AD-387831.1 | 47.7 | 7.5 | 81.8 | 21.5 | 102.5 | 14.1 |
| AD-387833.1 | 47.4 | 9.0 | 60.3 | 15.1 | 89.1 | 25.2 |
| AD-387840.1 | 30.9 | 4.6 | 80.2 | 2.6 | 103.8 | 6.5 |
| AD-387842.1 | 90.5 | 13.0 | 87.6 | 20.6 | 124.4 | 14.9 |
| AD-387845.1 | 60.8 | 10.2 | 128.3 | 16.5 | 121.2 | 12.6 |
| AD-387846.1 | 69.4 | 16.4 | 61.2 | 9.1 | 123.4 | 24.6 |
| AD-387858.1 | 44.2 | 3.6 | 119.8 | 8.6 | 112.4 | 6.6 |
| AD-387861.1 | 55.5 | 3.8 | 93.1 | 17.0 | 113.1 | 27.6 |
| AD-387863.1 | 73.6 | 5.8 | 61.2 | 6.0 | 107.1 | 13.1 |
| AD-387865.1 | 58.0 | 5.7 | 121.9 | 21.3 | 117.5 | 15.1 |
| AD-387866.1 | 39.4 | 6.2 | 60.2 | 9.8 | 82.0 | 8.6 |
| AD-387869.1 | 71.7 | 11.6 | 90.7 | 17.4 | 121.0 | 23.8 |
| AD-387871.1 | 39.9 | 4.2 | 124.5 | 25.2 | 114.0 | 11.3 |
| AD-387875.1 | 31.0 | 6.1 | 83.3 | 9.3 | 84.0 | 28.0 |
| AD-387878.1 | 41.0 | 4.7 | 117.8 | 42.5 | 143.7 | 22.9 |
| AD-387880.1 | 36.8 | 2.1 | 92.1 | 13.4 | 116.7 | 15.2 |
| AD-387881.1 | 38.8 | 7.7 | 102.8 | 18.6 | 132.9 | 37.1 |
| AD-387882.1 | 47.3 | 4.3 | 104.2 | 29.1 | 79.7 | 14.4 |
| AD-387909.1 | 39.4 | 3.1 | 115.9 | 20.0 | 107.5 | 17.2 |
| AD-387937.1 | 82.1 | 9.4 | 82.3 | 17.6 | 97.3 | 20.2 |
| AD-387940.1 | 63.3 | 3.9 | 71.3 | 8.6 | 112.0 | 7.9 |
| AD-387941.1 | 54.0 | 9.3 | 89.6 | 16.3 | 116.9 | 3.3 |
| AD-387942.1 | 96.7 | 23.0 | 61.0 | 10.8 | 116.8 | 14.9 |
| AD-387944.1 | 47.2 | 6.7 | 54.1 | 10.9 | 92.2 | 17.6 |
| AD-387945.1 | 50.9 | 6.3 | 79.7 | 5.2 | 86.8 | 39.2 |
| AD-387947.1 | 82 | 9 | 80 | 5 | 90 | 20 |

Standard deviation = STDEV

TABLE 5
Modified sense and antisense strand sequences of human and primate ATXN2 siRNAs.

| | Sense | | | Antisense | | | | |
|---|---|---|---|---|---|---|---|---|
| Duplex | Oligo | | | Oligo | | | | |
| Name | Name | oligoSeq | Seq | Name | oligoSeq | Seq | mRNA target sequence | Seq |
| AD- | A- | uscsagucUfaCfGfAfuuucuuuugaL96 | 1358 | A- | VPusCfsaaaAfgAfAfaucgUfaGfacugasgsg | 1415 | CCUCAGUCUACGAUUUCUUUUGA | 1472 |
| 1037307.1 | 707687.1 | | | 1923523.1 | | | | |
| AD- | A- | csuscaguCfuAfCfGfauuucuuuuaL96 | 1359 | A- | VPusAfsaaaGfaAfAfucguAfgAfcugagsgsc | 1416 | GCCUCAGUCUACGAUUUCUUUUG | 1473 |
| 1037453.1 | 1923811.1 | | | 1923812.1 | | | | |
| AD- | A- | csasgucuAfcGfAfUfuucuuuugaaL96 | 1360 | A- | VPusUfscaaAfaGfAfaaucGfuAfgacugsasg | 1417 | CUCAGUCUACGAUUUCUUUUGAU | 1474 |
| 1037454.1 | 1923813.1 | | | 1923814.1 | | | | |
| AD- | A- | asasauguUfcAfGfAfcuuuguuguaL96 | 1361 | A- | VPusAfscaaCfaAfAfgucuGfaAfcauuusgsa | 1418 | UCAAAUGUUCAGACUUUGUUGUG | 1475 |
| 1038221.1 | 1925274.1 | | | 1925275.1 | | | | |
| AD- | A- | usgscuauCfaGfUfGfcuaaagugaaL96 | 1362 | A- | VPusUfscacUfuUfAfgcacUfgAfuagcasgsa | 1419 | UCUGCUAUCAGUGCUAAAGUGAA | 1476 |
| 1038402.1 | 708269.1 | | | 1925618.1 | | | | |
| AD- | A- | gsasuaacUfcAfGfAfagaauuuuuaL96 | 1363 | A- | VPusAfsaaaAfuUfCfuucuGfaGfuuaucsusc | 1420 | GAGAUAACUCAGAAGAAUUUUUA | 1477 |
| 1039174.1 | 708701.1 | | | 1927090.1 | | | | |
| AD- | A- | csgsuaugAfuAfGfCfaguuuaucuaL96 | 1364 | A- | VPusAfsgauAfaAfCfugcuAfuCfauacgsusa | 1421 | UACGUAUGAUAGCAGUUUAUCUU | 1478 |
| 1039346.1 | 1927415.1 | | | 1927416.1 | | | | |
| AD- | A- | gsusaugaUfaGfCfAfguuuaucuuaL96 | 1365 | A- | VPusAfsagaUfaAfAfcugcUfaUfcauacsgsu | 1422 | ACGUAUGAUAGCAGUUUAUCUUC | 1479 |
| 1039347.1 | 1927417.1 | | | 1927418.1 | | | | |
| AD- | A- | asusccacUfuCfUfCfacacuucagaL96 | 1366 | A- | VPusCfsugaAfgUfGfugagAfaGfuggauscsu | 1423 | AGAUCCACUUCUCACACUUCAGA | 1480 |
| 1039956.1 | 709219.1 | | | 1928560.1 | | | | |
| AD- | A | uscsucacAfcUfUfCfagauuucaaaL96 | 1367 | A- | VPusUfsugaAfaUfCfugaaGfuGfugagasasg | 1424 | CUUCUCACACUUCAGAUUUCAAC | 1481 |
| 1040054.1 | 1928751.1 | | | 1928752.1 | | | | |
| AD- | A- | csuscuacUfaUfGfCfcuaaacgcaaL96 | 1368 | A- | VPusUfsgcgUfuUfAfggcaUfaGfuagagsasc | 1425 | GUCUCUACUAUGCCUAAACGCAU | 1482 |
| 1040559.1 | 1929687.1 | | | 1929688.1 | | | | |
| AD- | A- | uscsuacuAfuGfCfCfuaaacgcauaL96 | 1369 | A- | VPusAfsugcGfuUfUfaggcAfuAfguagasgsa | 1426 | UCUCUACUAUGCCUAAACGCAUG | 1483 |
| 1040560.1 | 1929689.1 | | | 1929690.1 | | | | |
| AD- | A- | uscsgaaaUfcAfCfAfgaguuucugaL96 | 1370 | A- | VPusCfsagaAfaCfUfcuguGfaUfuucgasgsg | 1427 | CCUCGAAAUCACAGAGUUUCUGC | 1484 |
| 1040735.1 | 1929999.1 | | | 1930000.1 | | | | |
| AD- | A- | csgsaaauCfaCfAfGfaguuucugcaL96 | 1371 | A- | VPusGfscagAfaAfCfucugUfgAfuuucgsasg | 1428 | CUCGAAAUCACAGAGUUUCUGCU | 1485 |
| 1040736.1 | 1930001.1 | | | 1930002.1 | | | | |
| AD- | A- | ususcuacUfuCfUfGfaaucuauggaL96 | 1372 | A- | VPusCfscauAfgAfUfucagAfaGfuagaascsu | 1429 | AGUUCUACUUCUGAAUCUAUGGA | 1486 |
| 1041615.1 | 710445.1 | | | 1931560.1 | | | | |
| AD- | A- | ascsuacuAfaAfCfAfaaaauagagaL96 | 1373 | A- | VPusCfsucuAfuUfUfuuguUfuAfguagususg | 1430 | CAACUACUAAACAAAAAUAGAGA | 1487 |
| 1041633.1 | 710485.1 | | | 1931578.1 | | | | |
| AD- | A- | gsusucuaCfuUfCfUfgaaucuaugaL96 | 1374 | A- | VPusCfsauaGfaUfUfcagaAfgUfagaacsusu | 1431 | AAGUUCUACUUCUGAAUCUAUGG | 1488 |
| 1041737.1 | 1931750.1 | | | 1931751.1 | | | | |
| AD- | A- | uscsuacuUfcUfGfAfaucuauggaaL96 | 1375 | A- | VPusUfsccaUfaGfAfuucaGfaAfguagasasc | 1432 | GUUCUACUUCUGAAUCUAUGGAU | 1489 |
| 1041738.1 | 1931752.1 | | | 1931753.1 | | | | |
| AD- | A- | csusacuuCfuGfAfAfucuauggauaL96 | 1376 | A- | VPusAfsuccAfuAfGfauucAfgAfaguagsasa | 1433 | UUCUACUUCUGAAUCUAUGGAUC | 1490 |
| 1041739.1 | 1931754.1 | | | 1931755.1 | | | | |
| AD- | A- | ascscaagUfgCfUfAfaggauucuuaL96 | 1377 | A- | VPusAfsagaAfuCfCfuuagCfaCfuuggususc | 1434 | GAACCAAGUGCUAAGGAUUCUUU | 1491 |
| 1041872.1 | 1931976.1 | | | 1931977.1 | | | | |
| AD- | A- | ususaggaAfaUfCfAfacauugaauaL96 | 1378 | A- | VPusAfsuucAfaUfGfuugaUfuUfccuaascsu | 1435 | AGUUAGGAAAUCAACAUUGAAUC | 1492 |
| 1042122.1 | 1932406.1 | | | 1932407.1 | | | | |
| AD- | A- | asgsccaaCfuCfCfAfguuuauacuaL96 | 1379 | A- | VPusAfsguaUfaAfAfcuggAfgUfuggcusgsu | 1436 | ACAGCCAACUCCAGUUUAUACUC | 1493 |
| 1042374.1 | 1932840.1 | | | 1932841.1 | | | | |
| AD- | A- | ususcuucAfgCfAfAfcucaguacgaL96 | 1380 | A- | VPusCfsguaCfuGfAfguugCfuGfaagaasgsa | 1437 | UCUUCUUCAGCAACUCAGUACGG | 1494 |
| 1043031.1 | 1933944.1 | | | 1933945.1 | | | | |
| AD- | A- | ususucuaCfuUfUfGfccauuuccaaL96 | 1381 | A- | VPusUfsggaAfaUfGfgcaaAfgUfagaaasgsa | 1438 | UCUUUCUACUUUGCCAUUUCCAC | 1495 |
| 1043150.1 | 1934166.1 | | | 1934167.1 | | | | |
| AD- | A- | ususcuacUfuUfGfCfcauuuccacaL96 | 1382 | A- | VPusGfsuggAfaAfUfggcaAfaGfuagaasasg | 1439 | CUUUCUACUUUGCCAUUUCCACG | 1496 |
| 1043151.1 | 1934168.1 | | | 1934169.1 | | | | |
| AD- | A- | uscsuuguAfaCfAfUfccaauaggaaL96 | 1383 | A- | VPusUfsccuAfuUfGfgaugUfuAfcaagasasa | 1440 | UUUCUUGUAACAUCCAAUAGGAA | 1497 |
| 1044184.1 | 713113.1 | | | 1935929.1 | | | | |
| AD- | A- | cscsgaaaCfuGfGfAfaguuauuuaaL96 | 1384 | A- | VPusUfsaaaUfaAfCfuuccAfgUfuucggscsa | 1441 | UGCCGAAACUGGAAGUUAUUUAU | 1498 |
| 1044473.1 | 1936426.1 | | | 1936427.1 | | | | |
| AD- | A- | asasacugGfaAfGfUfuauuuauuuaL96 | 1385 | A- | VPusAfsaauAfaAfUfaacuUfcCfaguuuscsg | 1442 | CGAAACUGGAAGUUAUUUAUUUU | 1499 |
| 1044476.1 | 1936432.1 | | | 1936433.1 | | | | |
| AD- | A- | asgsugguUfcAfAfCfuuuuaaguuaL96 | 1386 | A- | VPusAfsacuUfaAfAfaguuGfaAfccacusgsu | 1443 | ACAGUGGUUCAACUUUUAAGUUA | 1500 |
| 1044729.1 | 713683.1 | | | 1936873.1 | | | | |
| AD- | A- | gsusgguuCfaAfCfUfuuuaaguuaaL96 | 1387 | A- | VPusUfsaacUfuAfAfaaguUfgAfaccacsusg | 1444 | CAGUGGUUCAACUUUUAAGUUAA | 1501 |
| 1044730.1 | 713685.1 | | | 1936874.1 | | | | |
| AD- | A- | usasagggAfaAfAfAfcuuuuacuuaL96 | 1388 | A- | VPusAfsaguAfaAfAfguuuUfuCfccuuasasc | 1445 | GUUAAGGGAAAAACUUUUACUUU | 1502 |
| 1044831.1 | 1937057.1 | | | 1937058.1 | | | | |
| AD- | A- | csasuga(Ghd)AfaAfAfGfuacagaauca | 1389 | A- | VPusGfsauuCfuGfUfacuuUfuCfucaugsusg | 1446 | CACAUGAGAAAAGUACAGAAUCC | 1503 |
| 1069807.1 | 1985500.1 | L96 | | 1925201.1 | | | | |
| AD- | A- | usgsaau(Chd)UfaUfGfGfaucaacuaca | 1390 | A- | VPusGfsuagUfuGfAfuccaUfaGfauucasgsa | 1447 | UCUGAAUCUAUGGAUCAACUACU | 1504 |
| 1069808.1 | 1985501.1 | L96 | | 1931763.1 | | | | |
| AD- | A- | cscsgaa(Ahd)CfuGfGfAfaguuauuuaa | 1391 | A- | VPusUfsaaaUfaAfCfuuccAfgUfuucggscsa | 1448 | UGCCGAAACUGGAAGUUAUUUAU | 1505 |
| 1069809.1 | 1985502.1 | L96 | | 1936427.1 | | | | |
| AD- | A- | csusuga(Ahd)AfgUfCfAfugaacacaua | 1392 | A- | VPusAfsuguGfuUfCfaugaCfuUfucaagsgsg | 1449 | CCCUUGAAAGUCAUGAACACAUC | 1506 |
| 1069810.1 | 1985503.1 | L96 | | 1936447.1 | | | | |
| AD- | A- | asgsuca(Uhd)GfaAfCfAfcaucagcuaa | 1393 | A- | VPusUfsagcUfgAfUfguguUfcAfugacususu | 1450 | AAAGUCAUGAACACAUCAGUAG | 1507 |
| 1069811.1 | 1985504.1 | L96 | | 1936455.1 | | | | |
| AD- | A- | gsuscau(Ghd)AfaCfAfCfaucagcuaga | 1394 | A- | VPusCfsuagCfuGfAfugugUfuCfaugacsusu | 1451 | AAGUCAUGAACACAUCAGCUAGC | 1508 |
| 1069812.1 | 1985505.1 | L96 | | 1936457.1 | | | | |
| AD- | A- | csasuga(Ahd)CfaCfAfUfcagcuagcaa | 1395 | A- | VPusUfsgcuAfgCfUfgaugUfgUfucaugsasc | 1452 | GUCAUGAACACAUCAGCUAGCAA | 1509 |
| 1069813.1 | 1985506.1 | L96 | | 1936390.1 | | | | |
| AD- | A- | asgsagu(Ghd)AfuUfCfUfugcugcuaua | 1396 | A- | VPusAfsuagCfaGfCfaagaAfuCfacucususg | 1453 | CAAGAGUGAUUCUUGCUGCUAUU | 1510 |
| 1069814.1 | 1985507.1 | L96 | | 1936499.1 | | | | |
| AD- | A- | gsusgau(Uhd)CfuUfGfCfugcuauuaca | 1397 | A- | VPusGfsuaaUfaGfCfagcaAfgAfaucacsusc | 1454 | GAGUGAUUCUUGCUGCUAUUACU | 1511 |
| 1069815.1 | 1985508.1 | L96 | | 1936503.1 | | | | |
| AD- | A- | csgsccc(Uhd)UfuUfAfCfuaaacuugaa | 1398 | A- | VPusUfscaaGfuUfUfaguaAfaAfgggcgsusu | 1455 | AACGCCCUUUUACUAAACUUGAC | 1512 |
| 1069816.1 | 1985509.1 | L96 | | 1936785.1 | | | | |
| AD- | A- | usasccg(Uhd)CfaAfAfCfugacggauua | 1399 | A- | VPusAfsaucCfgUfCfaguuUfgAfcgguasasg | 1456 | CUUACCGUCAAACUGACGGAUUA | 1513 |
| 1069817.1 | 1985510.1 | L96 | | 1936746.1 | | | | |
| AD- | A- | ascsugu(Chd)UfaCfAfGfugguucaaca | 1400 | A- | VPusGfsuugAfaCfCfacugUfaGfacagusgsa | 1457 | UCACUGUCUACAGUGGUUCAACU | 1514 |
| 1069818.1 | 1985511.1 | L96 | | 1937022.1 | | | | |
| AD- | A- | csasugagAfaAfAfGfuacagaaucaL96 | 1401 | A- | VPusGfsauuc(Tgn)guacuuUfuCfucaugsusg | 1458 | CACAUGAGAAAAGUACAGAAUCC | 1515 |
| 1103822.1 | 1925200.1 | | | 2051801.1 | | | | |
| AD- | A- | usgsaaucUfaUfGfGfaucaacuacaL96 | 1402 | A- | VPusGfsuagu(Tgn)gauccaUfaGfauucasgsa | 1459 | UCUGAAUCUAUGGAUCAACUACU | 1516 |
| 1103823.1 | 1931762.1 | | | 2051802.1 | | | | |
| AD- | A- | cscsgaaaCfuGfGfAfaguuauuuaaL96 | 1403 | A- | VPusUfsaaau(Agn)acuuccAfgUfuucggscsa | 1460 | UGCCGAAACUGGAAGUUAUUUAU | 1517 |
| 1103824.1 | 1936426.1 | | | 2051803.1 | | | | |
| AD- | A- | csusugaaAfgUfCfAfugaacacauaL96 | 1404 | A- | VPusAfsugug(Tgn)ucaugaCfuUfucaagsgsg | 1461 | CCCUUGAAAGUCAUGAACACAUC | 1518 |
| 1103825.1 | 1936446.1 | | | 2051804.1 | | | | |
| AD- | A- | asgsucauGfaAfCfAfcaucagcuaaL96 | 1405 | A- | VPusUfsagcu(Ggn)auguguUfcAfugacususu | 1462 | AAAGUCAUGAACACAUCAGCUAG | 1519 |
| 1103826.1 | 1936454.1 | | | 2051805.1 | | | | |
| AD- | A- | gsuscaugAfaCfAfCfaucagcuagaL96 | 1406 | A- | VPusCfsuagc(Tgn)gaugugUfuCfaugacsusu | 1463 | AAGUCAUGAACACAUCAGCUAGC | 1520 |
| 1103827.1 | 1936456.1 | | | 2051806.1 | | | | |
| AD- | A- | csasugaaCfaCfAfUfcagcuagcaaL96 | 1407 | A- | VPusUfsgcua(Ggn)cugaugUfgUfucaugsasc | 1464 | GUCAUGAACACAUCAGCUAGCAA | 1521 |
| 1103828.1 | 713367.1 | | | 2051807.1 | | | | |
| AD- | A- | asgsagugAfuUfCfUfugcugcuauaL96 | 1408 | A- | VPusAfsuagc(Agn)gcaagaAfuCfacucususg | 1465 | CAAGAGUGAUUCUUGCUGCUAUU | 1522 |
| 1103829.1 | 1936498.1 | | | 2051808.1 | | | | |
| AD- | A- | gsusgauuCfuUfGfCfugcuauuacaL96 | 1409 | A- | VPusGfsuaau(Agn)gcagcaAfgAfaucacsusc | 1466 | GAGUGAUUCUUGCUGCUAUUACU | 1523 |
| 1103830.1 | 1936502.1 | | | 2051809.1 | | | | |
| AD- | A- | csgscccuUfuUfAfCfuaaacuugaaL96 | 1410 | A- | VPusUfscaag(Tgn)uuaguaAfaAfgggcgsusu | 1467 | AACGCCCUUUUACUAAACUUGAC | 1524 |
| 1103831.1 | 1936784.1 | | | 2051810.1 | | | | |
| AD- | A- | usasccguCfaAfAfCfugacggauuaL96 | 1411 | A- | VPusAfsaucc(Ggn)ucaguuUfgAfcgguasasg | 1468 | CUUACCGUCAAACUGACGGAUUA | 1525 |
| 1103832.1 | 713565.1 | | | 2051811.1 | | | | |
| AD- | A- | ascsugucUfaCfAfGfugguucaacaL96 | 1412 | A- | VPusGfsuuga(Agn)ccacugUfaGfacagusgsa | 1469 | UCACUGUCUACAGUGGUUCAACU | 1526 |
| 1103833.1 | 1937021.1 | | | 2051812.1 | | | | |
| AD- | A- | gsusgaagUfaCfAfAfgugaaaaacaL96 | 1413 | A- | VPusGfsuuuu(Tgn)cacuugUfaCfuucacsasu | 1470 | AUGUGAAGUACAAGUGAAAAAUG | 1527 |
| 1103834.1 | 2051813.1 | | | 2051814.1 | | | | |
| AD- | A- | asgsucauGfaAfCfAfcaucagcuaaL96 | 1414 | A- | VPusUfsagcu(Ggn)auguguUfcAfugacuscsu | 1471 | AAAGUCAUGAACACAUCAGCUAG | 1528 |
| 1103835.1 | 1936454.1 | | | 2051815.1 | | | | |

TABLE 6
Unmodified sense and antisense strand sequences of human and primate ATXN2 siRNAs.

| Duplex | senseOligo | | | | | antisOligo | | | | |
|---|---|---|---|---|---|---|---|---|---|---|
| Name | Name | transSeq | Seq | Source Name | Range | Name | transSeq | Seq | Source Name | Range |
| AD- | A-707687.1 | UCAGUCUACGAUUUCUUUUGA | 1529 | NM_002973.4 | 921- | A-1923523.1 | UCAAAAGAAAUCGUAGACUGAGG | 1586 | NM_002973.4 | 919- |
| 1037307.1 | | | | | 941 | | | | | 941 |
| AD- | A-1923811.1 | CUCAGUCUACGAUUUCUUUUA | 1530 | NM_002973.4 | 559- | A-1923812.1 | UAAAAGAAAUCGUAGACUGAGGC | 1587 | NM_002973.4 | 557- |
| 1037453.1 | | | | | 579 | | | | | 579 |
| AD- | A-1923813.1 | CAGUCUACGAUUUCUUUUGAA | 1531 | NM_002973.4 | 561- | A-1923814.1 | UUCAAAAGAAAUCGUAGACUGAG | 1588 | NM_002973.4 | 559- |
| 1037454.1 | | | | | 581 | | | | | 581 |
| AD- | A-1925274.1 | AAAUGUUCAGACUUUGUUGUA | 1532 | NM_002973.4 | 792- | A-1925275.1 | UACAACAAAGUCUGAACAUUUGA | 1589 | NM_002973.4 | 790- |
| 1038221.1 | | | | | 812 | | | | | 812 |
| AD- | A-708269.1 | UGCUAUCAGUGCUAAAGUGAA | 1533 | NM_002973.4 | 1230- | A-1925618.1 | UUCACUUUAGCACUGAUAGCAGA | 1590 | NM_002973.4 | 1228- |
| 1038402.1 | | | | | 1250 | | | | | 1250 |
| AD- | A-708701.1 | GAUAACUCAGAAGAAUUUUUA | 1534 | NM_002973.4 | 1447- | A-1927090.1 | UAAAAAUUCUUCUGAGUUAUCUC | 1591 | NM_002973.4 | 1445- |
| 1039174.1 | | | | | 1467 | | | | | 1467 |
| AD- | A-1927415.1 | CGUAUGAUAGCAGUUUAUCUA | 1535 | NM_002973.4 | 1042- | A-1927416.1 | UAGAUAAACUGCUAUCAUACGUA | 1592 | NM_002973.4 | 1040- |
| 1039346.1 | | | | | 1062 | | | | | 1062 |
| AD- | A-1927417.1 | GUAUGAUAGCAGUUUAUCUUA | 1536 | NM_002973.4 | 1043- | A-1927418.1 | UAAGAUAAACUGCUAUCAUACGU | 1593 | NM_002973.4 | 1041- |
| 1039347.1 | | | | | 1063 | | | | | 1063 |
| AD- | A-709219.1 | AUCCACUUCUCACACUUCAGA | 1537 | NM_002973.4 | 1743- | A-1928560.1 | UCUGAAGUGUGAGAAGUGGAUCU | 1594 | NM_002973.4 | 1741- |
| 1039956.1 | | | | | 1763 | | | | | 1763 |
| AD- | A-1928751.1 | UCUCACACUUCAGAUUUCAAA | 1538 | NM_002973.4 | 1389- | A-1928752.1 | UUUGAAAUCUGAAGUGUGAGAAG | 1595 | NM_002973.4 | 1387- |
| 1040054.1 | | | | | 1409 | | | | | 1409 |
| AD- | A-1929687.1 | CUCUACUAUGCCUAAACGCAA | 1539 | NM_002973.4 | 1625- | A-1929688.1 | UUGCGUUUAGGCAUAGUAGAGAC | 1596 | NM_002973.4 | 1623- |
| 1040559.1 | | | | | 1645 | | | | | 1645 |
| AD- | A-1929689.1 | UCUACUAUGCCUAAACGCAUA | 1540 | NM_002973.4 | 1626- | A-1929690.1 | UAUGCGUUUAGGCAUAGUAGAGA | 1597 | NM_002973.4 | 1624- |
| 1040560.1 | | | | | 1646 | | | | | 1646 |
| AD- | A-1929999.1 | UCGAAAUCACAGAGUUUCUGA | 1541 | NM_002973.4 | 1694- | A-1930000.1 | UCAGAAACUCUGUGAUUUCGAGG | 1598 | NM_002973.4 | 1692- |
| 1040735.1 | | | | | 1714 | | | | | 1714 |
| AD- | A-1930001.1 | CGAAAUCACAGAGUUUCUGCA | 1542 | NM_002973.4 | 1695- | A-1930002.1 | UGCAGAAACUCUGUGAUUUCGAG | 1599 | NM_002973.4 | 1693- |
| 1040736.1 | | | | | 1715 | | | | | 1715 |
| AD- | A-710445.1 | UUCUACUUCUGAAUCUAUGGA | 1543 | NM_002973.4 | 2589- | A-1931560.1 | UCCAUAGAUUCAGAAGUAGAACU | 1600 | NM_002973.4 | 2587- |
| 1041615.1 | | | | | 2609 | | | | | 2609 |
| AD- | A-710485.1 | ACUACUAAACAAAAAUAGAGA | 1544 | NM_002973.4 | 2613- | A-1931578.1 | UCUCUAUUUUUGUUUAGUAGUUG | 1601 | NM_002973.4 | 2611- |
| 1041633.1 | | | | | 2633 | | | | | 2633 |
| AD- | A-1931750.1 | GUUCUACUUCUGAAUCUAUGA | 1545 | NM_002973.4 | 2227- | A-1931751.1 | UCAUAGAUUCAGAAGUAGAACUU | 1602 | NM_002973.4 | 2225- |
| 1041737.1 | | | | | 2247 | | | | | 2247 |
| AD- | A-1931752.1 | UCUACUUCUGAAUCUAUGGAA | 1546 | NM_002973.4 | 2229- | A-1931753.1 | UUCCAUAGAUUCAGAAGUAGAAC | 1603 | NM_002973.4 | 2227- |
| 1041738.1 | | | | | 2249 | | | | | 2249 |
| AD- | A-1931754.1 | CUACUUCUGAAUCUAUGGAUA | 1547 | NM_002973.4 | 2230- | A-1931755.1 | UAUCCAUAGAUUCAGAAGUAGAA | 1604 | NM_002973.4 | 2228- |
| 1041739.1 | | | | | 2250 | | | | | 2250 |
| AD- | A-1931976.1 | ACCAAGUGCUAAGGAUUCUUA | 1548 | NM_002973.4 | 2312- | A-1931977.1 | UAAGAAUCCUUAGCACUUGGUUC | 1605 | NM_002973.4 | 2310- |
| 1041872.1 | | | | | 2332 | | | | | 2332 |
| AD- | A-1932406.1 | UUAGGAAAUCAACAUUGAAUA | 1549 | NM_002973.4 | 2527- | A-1932407.1 | UAUUCAAUGUUGAUUUCCUAACU | 1606 | NM_002973.4 | 2525- |
| 1042122.1 | | | | | 2547 | | | | | 2547 |
| AD- | A-1932840.1 | AGCCAACUCCAGUUUAUACUA | 1550 | NM_002973.4 | 2659- | A-1932841.1 | UAGUAUAAACUGGAGUUGGCUGU | 1607 | NM_002973.4 | 2657- |
| 1042374.1 | | | | | 2679 | | | | | 2679 |
| AD- | A-1933944.1 | UUCUUCAGCAACUCAGUACGA | 1551 | NM_002973.4 | 3068- | A-1933945.1 | UCGUACUGAGUUGCUGAAGAAGA | 1608 | NM_002973.4 | 3066- |
| 1043031.1 | | | | | 3088 | | | | | 3088 |
| AD- | A-1934166.1 | UUUCUACUUUGCCAUUUCCAA | 1552 | NM_002973.4 | 3158- | A-1934167.1 | UUGGAAAUGGCAAAGUAGAAAGA | 1609 | NM_002973.4 | 3156- |
| 1043150.1 | | | | | 3178 | | | | | 3178 |
| AD- | A-1934168.1 | UUCUACUUUGCCAUUUCCACA | 1553 | NM_002973.4 | 3159- | A-1934169.1 | UGUGGAAAUGGCAAAGUAGAAAG | 1610 | NM_002973.4 | 3157- |
| 1043151.1 | | | | | 3179 | | | | | 3179 |
| AD- | A-713113.1 | UCUUGUAACAUCCAAUAGGAA | 1554 | NM_002973.4 | 4223- | A-1935929.1 | UUCCUAUUGGAUGUUACAAGAAA | 1611 | NM_002973.4 | 4221- |
| 1044184.1 | | | | | 4243 | | | | | 4243 |
| AD- | A-1936426.1 | CCGAAACUGGAAGUUAUUUAA | 1555 | NM_002973.4 | 4004- | A-1936427.1 | UUAAAUAACUUCCAGUUUCGGCA | 1612 | NM_002973.4 | 4002- |
| 1044473.1 | | | | | 4024 | | | | | 4024 |
| AD- | A-1936432.1 | AAACUGGAAGUUAUUUAUUUA | 1556 | NM_002973.4 | 4007- | A-1936433.1 | UAAAUAAAUAACUUCCAGUUUCG | 1613 | NM_002973.4 | 4005- |
| 1044476.1 | | | | | 4027 | | | | | 4027 |
| AD- | A-713683.1 | AGUGGUUCAACUUUUAAGUUA | 1557 | NM_002973.4 | 4600- | A-1936873.1 | UAACUUAAAAGUUGAACCACUGU | 1614 | NM_002973.4 | 4598- |
| 1044729.1 | | | | | 4620 | | | | | 4620 |
| AD- | A-713685.1 | GUGGUUCAACUUUUAAGUUAA | 1558 | NM_002973.4 | 4601- | A-1936874.1 | UUAACUUAAAAGUUGAACCACUG | 1615 | NM_002973.4 | 4599- |
| 1044730.1 | | | | | 4621 | | | | | 4621 |
| AD- | A-1937057.1 | UAAGGGAAAAACUUUUACUUA | 1559 | NM_002973.4 | 4258- | A-1937058.1 | UAAGUAAAAGUUUUUCCCUUAAC | 1616 | NM_002973.4 | 4256- |
| 1044831.1 | | | | | 4278 | | | | | 4278 |
| AD- | A-1985500.1 | CAUGAGAAAAGUACAGAAUCA | 1560 | NM_002973.4 | 726- | A-1925201.1 | UGAUUCUGUACUUUUCUCAUGUG | 1617 | NM_002973.4 | 724- |
| 1069807.1 | | | | | 746 | | | | | 746 |
| AD- | A-1985501.1 | UGAAUCUAUGGAUCAACUACA | 1561 | NM_002973.4 | 2237- | A-1931763.1 | UGUAGUUGAUCCAUAGAUUCAGA | 1618 | NM_002973.4 | 2235- |
| 1069808.1 | | | | | 2257 | | | | | 2257 |
| AD- | A-1985502.1 | CCGAAACUGGAAGUUAUUUAA | 1562 | NM_002973.4 | 4004- | A-1936427.1 | UUAAAUAACUUCCAGUUUCGGCA | 1619 | NM_002973.4 | 4002- |
| 1069809.1 | | | | | 4024 | | | | | 4024 |
| AD- | A-1985503.1 | CUUGAAAGUCAUGAACACAUA | 1563 | NM_002973.4 | 4037- | A-1936447.1 | UAUGUGUUCAUGACUUUCAAGGG | 1620 | NM_002973.4 | 4035- |
| 1069810.1 | | | | | 4057 | | | | | 4057 |
| AD- | A-1985504.1 | AGUCAUGAACACAUCAGCUAA | 1564 | NM_002973.4 | 4043- | A-1936455.1 | UUAGCUGAUGUGUUCAUGACUUU | 1621 | NM_002973.4 | 4041- |
| 1069811.1 | | | | | 4063 | | | | | 4063 |
| AD- | A-1985505.1 | GUCAUGAACACAUCAGCUAGA | 1565 | NM_002973.4 | 4044- | A-1936457.1 | UCUAGCUGAUGUGUUCAUGACUU | 1622 | NM_002973.4 | 4042- |
| 1069812.1 | | | | | 4064 | | | | | 4064 |
| AD- | A-1985506.1 | CAUGAACACAUCAGCUAGCAA | 1566 | NM_002973.4 | 4046- | A-1936390.1 | UUGCUAGCUGAUGUGUUCAUGAC | 1623 | NM_002973.4 | 4044- |
| 1069813.1 | | | | | 4066 | | | | | 4066 |
| AD- | A-1985507.1 | AGAGUGAUUCUUGCUGCUAUA | 1567 | NM_002973.4 | 4078- | A-1936499.1 | UAUAGCAGCAAGAAUCACUCUUG | 1624 | NM_002973.4 | 4076- |
| 1069814.1 | | | | | 4098 | | | | | 4098 |
| AD- | A-1985508.1 | GUGAUUCUUGCUGCUAUUACA | 1568 | NM_002973.4 | 4081- | A-1936503.1 | UGUAAUAGCAGCAAGAAUCACUC | 1625 | NM_002973.4 | 4079- |
| 1069815.1 | | | | | 4101 | | | | | 4101 |
| AD- | A-1985509.1 | CGCCCUUUUACUAAACUUGAA | 1569 | NM_002973.4 | 4139- | A-1936785.1 | UUCAAGUUUAGUAAAAGGGCGUU | 1626 | NM_002973.4 | 4137- |
| 1069816.1 | | | | | 4159 | | | | | 4159 |
| AD- | A-1985510.1 | UACCGUCAAACUGACGGAUUA | 1570 | NM_002973.4 | 4178- | A-1936746.1 | UAAUCCGUCAGUUUGACGGUAAG | 1627 | NM_002973.4 | 4176- |
| 1069817.1 | | | | | 4198 | | | | | 4198 |
| AD- | A-1985511.1 | ACUGUCUACAGUGGUUCAACA | 1571 | NM_002973.4 | 4230- | A-1937022.1 | UGUUGAACCACUGUAGACAGUGA | 1628 | NM_002973.4 | 4228- |
| 1069818.1 | | | | | 4250 | | | | | 4250 |
| AD- | A-1925200.1 | CAUGAGAAAAGUACAGAAUCA | 1572 | NM_002973.4 | 726- | A-2051801.1 | UGAUUCTGUACUUUUCUCAUGUG | 1629 | NM_002973.4 | 724- |
| 1103822.1 | | | | | 746 | | | | | 746 |
| AD- | A-1931762.1 | UGAAUCUAUGGAUCAACUACA | 1573 | NM_002973.4 | 2237- | A-2051802.1 | UGUAGUTGAUCCAUAGAUUCAGA | 1630 | NM_002973.4 | 2235- |
| 1103823.1 | | | | | 2257 | | | | | 2257 |
| AD- | A-1936426.1 | CCGAAACUGGAAGUUAUUUAA | 1574 | NM_002973.4 | 4004- | A-2051803.1 | UUAAAUAACUUCCAGUUUCGGCA | 1631 | NM_002973.4 | 4002- |
| 1103824.1 | | | | | 4024 | | | | | 4024 |
| AD- | A-1936446.1 | CUUGAAAGUCAUGAACACAUA | 1575 | NM_002973.4 | 4037- | A-2051804.1 | UAUGUGTUCAUGACUUUCAAGGG | 1632 | NM_002973.4 | 4035- |
| 1103825.1 | | | | | 4057 | | | | | 4057 |
| AD- | A-1936454.1 | AGUCAUGAACACAUCAGCUAA | 1576 | NM_002973.4 | 4043- | A-2051805.1 | UUAGCUGAUGUGUUCAUGACUUU | 1633 | NM_002973.4 | 4041- |
| 1103826.1 | | | | | 4063 | | | | | 4063 |
| AD- | A-1936456.1 | GUCAUGAACACAUCAGCUAGA | 1577 | NM_002973.4 | 4044- | A-2051806.1 | UCUAGCTGAUGUGUUCAUGACUU | 1634 | NM_002973.4 | 4042- |
| 1103827.1 | | | | | 4064 | | | | | 4064 |
| AD- | A-713367.1 | CAUGAACACAUCAGCUAGCAA | 1578 | NM_002973.4 | 4407- | A-2051807.1 | UUGCUAGCUGAUGUGUUCAUGAC | 1635 | NM_002973.4 | 4405- |
| 1103828.1 | | | | | 4427 | | | | | 4427 |
| AD- | A-1936498.1 | AGAGUGAUUCUUGCUGCUAUA | 1579 | NM_002973.4 | 4078- | A-2051808.1 | UAUAGCAGCAAGAAUCACUCUUG | 1636 | NM_002973.4 | 4076- |
| 1103829.1 | | | | | 4098 | | | | | 4098 |
| AD- | A-1936502.1 | GUGAUUCUUGCUGCUAUUACA | 1580 | NM_002973.4 | 4081- | A-2051809.1 | UGUAAUAGCAGCAAGAAUCACUC | 1637 | NM_002973.4 | 4079- |
| 1103830.1 | | | | | 4101 | | | | | 4101 |
| AD- | A-1936784.1 | CGCCCUUUUACUAAACUUGAA | 1581 | NM_002973.4 | 4139- | A-2051810.1 | UUCAAGTUUAGUAAAAGGGCGUU | 1638 | NM_002973.4 | 4137- |
| 1103831.1 | | | | | 4159 | | | | | 4159 |
| AD- | A-713565.1 | UACCGUCAAACUGACGGAUUA | 1582 | NM_002973.4 | 4539- | A-2051811.1 | UAAUCCGUCAGUUUGACGGUAAG | 1639 | NM_002973.4 | 4537- |
| 1103832.1 | | | | | 4559 | | | | | 4559 |
| AD- | A-1937021.1 | ACUGUCUACAGUGGUUCAACA | 1583 | NM_002973.4 | 4230- | A-2051812.1 | UGUUGAACCACUGUAGACAGUGA | 1640 | NM_002973.4 | 4228- |
| 1103833.1 | | | | | 4250 | | | | | 4250 |
| AD- | A-2051813.1 | GUGAAGUACAAGUGAAAAACA | 1584 | NM_002973.4 | 640- | A-2051814.1 | UGUUUUTCACUUGUACUUCACAU | 1641 | NM_002973.4 | 638- |
| 1103834.1 | | | | | 660 | | | | | 660 |
| AD- | A-1936454.1 | AGUCAUGAACACAUCAGCUAA | 1585 | NM_002973.4 | 4043- | A-2051815.1 | UUAGCUGAUGUGUUCAUGACUCU | 1642 | NM_002973.4 | 4041- |
| 1103835.1 | | | | | 4063 | | | | | 4063 |

TABLE 7
ATXN2 in vitro screen in Hep3B and BE(2)-C Cell Systems. Data are expressed
as average percent transcript remaining, relative to non-targeting control.

| | |
|---|---|
| Hep3B | BE(2)-C |

| Duplex ID | 10 nM | SD | 1 nM | SD | 0.1 nM | SD | 50 nM | SD | 10 nM | SD | 1 nM | SD | 0.1 nM | SD |
|---|---|---|---|---|---|---|---|---|---|---|---|---|---|---|
| AD-1037307.1 | 57.08 | 12.83 | 54.00 | 13.29 | 57.30 | 10.13 | 34.52 | 4.14 | 33.15 | 2.96 | 45.56 | 2.63 | 61.26 | 6.09 |
| AD-1037453.1 | 44.32 | 18.73 | 44.23 | 8.50 | 65.76 | 14.07 | 36.48 | 12.89 | 25.45 | 3.20 | 36.25 | 7.18 | 51.50 | 7.85 |
| AD-1037454.1 | 53.70 | 9.90 | 64.67 | 8.05 | 76.35 | 8.72 | 52.13 | 15.81 | 72.38 | 16.39 | 68.87 | 23.27 | 67.70 | 22.56 |
| AD-1038221.1 | 53.68 | 4.37 | 76.38 | 7.91 | 89.65 | 13.69 | 58.97 | 11.30 | 70.35 | 9.58 | 83.63 | 2.14 | 98.19 | 10.75 |
| AD-1038402.1 | 50.08 | 26.78 | 52.67 | 10.60 | 71.69 | 18.35 | 39.31 | 3.66 | 36.14 | 1.92 | 48.76 | 4.52 | 58.24 | 5.81 |
| AD-1039174.1 | 43.31 | 16.52 | 53.07 | 11.55 | 47.29 | 15.06 | 45.39 | 8.15 | 49.01 | 5.45 | 63.93 | 6.16 | 85.40 | 5.67 |
| AD-1039346.1 | 51.57 | 24.05 | 42.37 | 4.99 | 45.37 | 6.32 | 47.30 | 14.32 | 38.42 | 11.89 | 43.95 | 2.86 | 62.08 | 3.89 |
| AD-1039347.1 | 47.02 | 5.56 | 76.41 | 14.07 | 80.09 | 22.07 | 47.30 | 5.35 | 58.20 | 3.11 | 67.88 | 9.19 | 95.96 | 9.82 |
| AD-1039956.1 | 56.56 | 23.15 | 53.44 | 5.25 | 68.30 | 1.91 | 28.62 | 5.01 | 29.01 | 5.40 | 42.50 | 5.47 | 58.06 | 10.50 |
| AD-1040054.1 | 76.80 | 20.96 | 69.30 | 4.98 | 88.10 | 15.41 | 27.40 | 4.11 | 30.55 | 4.47 | 39.18 | 7.05 | 52.29 | 6.05 |
| AD-1040559.1 | 40.29 | 6.04 | 35.91 | 2.07 | 56.72 | 12.34 | 21.74 | 3.26 | 23.29 | 4.14 | 33.15 | 5.51 | 43.02 | 7.10 |
| AD-1040560.1 | 38.65 | 15.74 | 34.16 | 3.96 | 75.69 | 48.49 | 49.31 | 26.72 | 27.84 | 1.95 | 39.01 | 0.81 | 48.83 | 3.82 |
| AD-1040735.1 | 41.19 | 11.58 | 38.47 | 6.74 | 57.41 | 19.85 | 31.37 | 11.73 | 24.66 | 4.14 | 40.60 | 3.99 | 49.18 | 7.69 |
| AD-1040736.1 | 29.90 | 11.37 | 35.26 | 4.27 | 51.06 | 7.12 | 27.40 | 9.63 | 22.02 | 1.32 | 33.07 | 5.33 | 39.55 | 3.35 |
| AD-1041615.1 | 40.53 | 11.34 | 70.88 | 5.17 | 70.18 | 25.44 | 45.01 | 0.65 | 48.44 | 5.63 | 72.73 | 3.83 | 87.37 | 5.97 |
| AD-1041633.1 | 41.36 | 16.11 | 60.40 | 9.54 | 56.55 | 15.65 | 33.56 | 1.75 | 41.03 | 5.54 | 51.89 | 5.74 | 70.49 | 7.02 |
| AD-1041737.1 | 27.20 | 6.43 | 35.47 | 4.54 | 51.23 | 5.43 | 37.27 | 17.57 | 23.92 | 3.44 | 33.06 | 4.23 | 39.74 | 9.44 |
| AD-1041738.1 | 61.11 | 15.14 | 83.09 | 9.61 | 114.49 | 19.31 | 40.03 | 7.08 | 67.85 | 15.28 | 74.38 | 25.04 | 73.33 | 11.12 |
| AD-1041739.1 | 33.98 | 12.92 | 35.65 | 11.55 | 55.44 | 17.98 | 22.57 | 4.84 | 18.51 | 1.48 | 25.68 | 2.97 | 29.91 | 2.51 |
| AD-1041872.1 | 29.35 | 14.77 | 43.54 | 6.81 | 39.10 | 4.22 | 29.16 | 4.17 | 27.64 | 5.59 | 40.44 | 6.06 | 44.63 | 6.34 |
| AD-1042122.1 | 32.50 | 2.15 | 43.70 | 3.05 | 60.35 | 4.17 | 49.17 | 17.00 | 62.20 | 13.87 | 61.33 | 13.77 | 62.07 | 19.07 |
| AD-1042374.1 | 50.21 | 7.41 | 74.04 | 18.91 | 71.15 | 4.96 | 45.65 | 11.15 | 81.57 | 16.70 | 74.41 | 16.28 | 87.26 | 6.73 |
| AD-1043031.1 | 44.60 | 5.55 | 61.03 | 8.08 | 79.57 | 29.67 | 32.50 | 2.35 | 42.57 | 9.18 | 45.61 | 9.55 | 54.76 | 8.55 |
| AD-1043150.1 | 115.99 | 43.81 | 99.02 | 17.65 | 76.74 | 4.51 | 62.64 | 7.07 | 50.46 | 8.59 | 58.61 | 13.66 | 62.14 | 8.85 |
| AD-1043151.1 | 124.20 | 45.85 | 107.29 | 11.21 | 82.74 | 10.14 | 72.54 | 23.42 | 81.53 | 9.91 | 72.57 | 2.90 | 78.68 | 14.49 |
| AD-1044184.1 | 42.78 | 4.51 | 57.55 | 5.55 | 65.90 | 11.91 | 39.95 | 6.22 | 47.34 | 7.50 | 57.50 | 5.59 | 76.50 | 6.19 |
| AD-1044473.1 | 71.16 | 20.19 | 58.65 | 6.45 | 71.00 | 15.78 | 44.54 | 2.77 | 46.39 | 6.72 | 50.87 | 5.17 | 68.86 | 6.05 |
| AD-1044476.1 | 46.27 | 13.28 | 45.28 | 6.42 | 78.37 | 29.34 | 46.82 | 7.21 | 36.97 | 4.07 | 42.62 | 1.39 | 58.04 | 5.72 |
| AD-1044729.1 | 34.96 | 10.31 | 35.00 | 2.18 | 65.51 | 21.57 | 34.46 | 4.48 | 35.94 | 2.99 | 41.40 | 3.38 | 49.03 | 4.46 |
| AD-1044730.1 | 63.76 | 38.61 | 55.42 | 5.69 | 55.77 | 8.28 | 27.75 | 2.62 | 28.24 | 3.85 | 34.01 | 7.17 | 43.34 | 9.41 |
| AD-1044831.1 | 87.56 | 42.44 | 63.29 | 5.74 | 55.13 | 13.25 | 30.67 | 4.71 | 41.16 | 4.69 | 47.46 | 1.66 | 55.76 | 3.76 |
| AD-1069807.1 | 74.17 | 3.87 | 102.33 | 25.98 | 90.59 | 6.13 | 27.26 | 2.21 | 75.90 | 21.36 | 63.05 | 10.63 | 32.66 | 5.77 |
| AD-1069808.1 | 33.54 | 1.67 | 68.82 | 31.60 | 73.38 | 10.73 | 16.37 | 3.14 | 61.47 | 3.43 | 63.52 | 5.49 | 32.86 | 5.91 |
| AD-1069809.1 | 51.16 | 1.71 | 63.31 | 14.02 | 111.23 | 16.09 | 28.19 | 5.69 | 71.66 | 2.03 | 79.73 | 10.42 | 36.41 | 3.89 |
| AD-1069810.1 | 60.17 | 9.53 | 67.98 | 15.33 | 95.92 | 17.36 | 28.02 | 6.05 | 67.41 | 4.43 | 99.20 | 6.20 | 35.66 | 2.58 |
| AD-1069811.1 | 47.27 | 2.41 | 56.11 | 6.60 | 116.58 | 21.58 | 28.80 | 7.06 | 61.39 | 4.08 | 103.83 | 7.71 | 32.19 | 3.13 |
| AD-1069812.1 | 43.61 | 6.20 | 49.67 | 17.36 | 87.04 | 25.86 | 25.86 | 4.02 | 58.79 | 10.25 | 111.06 | 10.91 | 28.46 | 4.27 |
| AD-1069813.1 | 44.95 | 5.84 | 60.73 | 18.08 | 88.51 | 25.52 | 28.67 | 3.05 | 56.61 | 4.20 | 124.60 | 9.93 | 27.90 | 3.99 |
| AD-1069814.1 | 36.64 | 6.33 | 55.73 | 25.77 | 56.67 | 4.31 | 20.16 | 2.59 | 33.65 | 6.10 | 71.15 | 40.44 | 19.77 | 1.86 |
| AD-1069815.1 | 70.89 | 13.72 | 72.15 | 12.54 | 75.63 | 17.94 | 27.43 | 4.50 | 57.44 | 15.10 | 47.86 | 7.44 | 35.90 | 4.23 |
| AD-1069816.1 | 68.84 | 23.01 | 74.26 | 13.80 | 81.48 | 18.88 | 33.45 | 4.24 | 84.85 | 16.75 | 61.84 | 4.60 | 46.72 | 4.62 |
| AD-1069817.1 | 76.40 | 18.09 | 95.92 | 31.29 | 84.26 | 8.15 | 49.51 | 3.15 | 93.84 | 10.72 | 79.35 | 13.94 | 44.25 | 14.02 |
| AD-1069818.1 | 36.23 | 3.83 | 63.77 | 11.44 | 62.23 | 13.64 | 36.63 | 4.23 | 72.39 | 7.52 | 84.75 | 8.11 | 37.79 | 5.89 |
| AD-1103822.1 | 55.37 | 3.47 | 65.10 | 13.49 | 72.14 | 16.09 | 65.20 | 8.57 | 87.42 | 20.62 | 84.74 | 7.78 | 106.68 | 13.63 |
| AD-1103823.1 | 53.56 | 16.89 | 61.10 | 8.44 | 61.58 | 13.56 | 66.42 | 11.89 | 69.58 | 6.05 | 70.41 | 4.51 | 122.30 | 23.79 |
| AD-1103824.1 | 52.94 | 1.49 | 77.35 | 8.32 | 80.89 | 18.65 | 69.44 | 17.89 | 67.03 | 9.12 | 78.71 | 5.74 | 113.62 | 14.26 |
| AD-1103825.1 | 50.43 | 5.31 | 57.27 | 7.83 | 70.82 | 9.08 | 46.09 | 2.61 | 49.37 | 7.33 | 70.23 | 7.39 | 101.20 | 18.27 |
| AD-1103826.1 | 50.20 | 8.88 | 71.15 | 2.79 | 79.17 | 15.27 | 42.68 | 1.80 | 51.37 | 5.50 | 69.39 | 8.85 | 78.74 | 11.92 |
| AD-1103827.1 | 76.27 | 30.88 | 72.19 | 14.41 | 86.15 | 12.78 | 44.07 | 5.04 | 54.69 | 9.78 | 63.42 | 12.94 | 71.11 | 5.33 |
| AD-1103828.1 | 74.45 | 9.41 | 62.10 | 5.72 | 69.31 | 23.21 | 44.20 | 11.18 | 39.49 | 7.07 | 46.63 | 14.73 | 50.20 | 6.10 |
| AD-1103829.1 | 45.43 | 14.54 | 39.03 | 5.01 | 53.87 | 23.00 | 53.37 | 19.01 | 72.87 | 26.84 | 61.12 | 24.90 | 64.72 | 18.24 |
| AD-1103830.1 | 41.04 | 3.28 | 56.53 | 8.23 | 62.35 | 6.61 | 77.15 | 10.88 | 65.10 | 35.52 | 79.24 | 36.78 | 100.25 | 14.24 |
| AD-1103831.1 | 61.28 | 18.27 | 63.76 | 4.37 | 80.15 | 8.76 | 77.35 | 12.15 | 84.20 | 7.53 | 100.25 | 18.52 | 123.02 | 22.14 |
| AD-1103832.1 | 57.50 | 6.54 | 70.86 | 9.49 | 66.10 | 5.79 | 78.90 | 11.86 | 73.71 | 4.88 | 94.45 | 7.55 | 129.96 | 18.58 |
| AD-1103833.1 | 51.21 | 7.19 | 64.00 | 4.75 | 79.11 | 24.95 | 66.27 | 6.68 | 61.96 | 12.36 | 84.71 | 7.29 | 115.09 | 11.41 |
| AD-1103834.1 | 79.61 | 38.12 | 59.29 | 8.69 | 54.68 | 3.99 | 50.97 | 9.98 | 61.75 | 7.03 | 86.53 | 5.52 | 108.81 | 6.23 |
| AD-1103835.1 | 48.75 | 18.34 | 49.76 | 8.63 | 34.40 | 8.15 | 45.81 | 3.38 | 62.09 | 8.46 | 73.92 | 6.92 | 82.12 | 6.25 |

Standard deviation = SD

TABLE 8
In vivo efficacy of ATX2 iRNA. Average percent
Gaussia princeps luciferase (gLuc) protein remaining,
compared to pre-bleed and average percent transcript
remaining in the liver compared PBS controls.

| | |
|---|---|
| gLuc (D14) | qPCR (D14) |

| Compound | Average | SD | Average | SD |
|---|---|---|---|---|
| PBS | 100 | 34.15 | 100.07 | 4.18 |
| Naïve | 101.17 | 17.75 | 111.34 | 20.1 |
| AD-365144 | 30.84 | 4.43 | 46.63 | 11.43 |
| AD-366366 | 72.24 | 4.31 | 64.9 | 9.12 |
| AD-367794 | 73.26 | 7.84 | 130.65 | 24.99 |
| AD-367809 | 45.03 | 5.16 | 70.89 | 8.26 |
| AD-367815 | 34.02 | 7.52 | 75.52 | 0.66 |
| AD-367816 | 37.49 | 13.25 | 50.64 | 8.16 |
| AD-367818 | 49.12 | 2.89 | 76.82 | 8.23 |
| AD-367850 | 60.91 | 2.06 | 91.18 | 5.34 |
| AD-367853 | 92.05 | 22.48 | 107.71 | 39.84 |
| AD-367878 | 61.5 | 13.7 | 67.71 | 18.43 |
| AD-367917 | 83.68 | 43.06 | 123.66 | 13.31 |
| AD-367967 | 73.69 | 9.74 | 115.73 | 37.65 |
| AD-387779 | 76.67 | 23.79 | 125 | 21.5 |

TABLE 9
ATXN2 C16-modified siRNA sequences also modified with 2′-O-hexadecyl-adenosine-3′-phosphate, 2′-O-hexadecyl-guanosine-3′-
phosphate, or 2′-O-hexadecyl-cytidine-3′-phosphate, or 2′-O-hexadecyl-uridine-3′-phosphate.

| accession. | mRNA | | | | | | | | | sense. | | antisense. | | mRNA. | |
|---|---|---|---|---|---|---|---|---|---|---|---|---|---|---|---|
| version | range | Sense Oligo Seq | Seq | Antisense Oligo Seq | Seq | sense | Seq | antisense | Seq | transSeq | Seq | transSeq | Seq | target | Seq |
| NM_ | 90- | uscscga(Chd)UfuCf | 1643 | VPusAfscucUfuUfAfcc | 1977 | UCCGACUU | 2311 | GACUCUUU | 2645 | UCCGACU | 2979 | UACUCUUU | 3313 | CCTCCGAC | 3647 |
| 002973.3 | 112 | CfGfguaaagagsusa | | ggAfaGfucggasgsg | | CCGGUAAA | | ACCGGAAG | | UCCGGUA | | ACCGGAAG | | TTCCGGTA | |
| | | | | | | GAGUC | | UCGGAGG | | AAGAGUA | | UCGGAGG | | AAGAGTC | |
| NM_ | 91- | cscsgac(Uhd)UfcCf | 1644 | VPusGfsacuCfuUfUfac | 1978 | CCGACUUC | 2312 | GGACUCUU | 2646 | CCGACUU | 2980 | UGACUCUU | 3314 | CTCCGACT | 3648 |
| 002973.3 | 113 | GfGfuaaagaguscsa | | cgGfaAfgucggsasg | | CGGUAAAG | | UACCGGAA | | CCGGUAA | | UACCGGAA | | TCCGGTAA | |
| | | | | | | AGUCC | | GUCGGAG | | AGAGUCA | | GUCGGAG | | AGAGTCC | |
| NM_ | 92- | csgsacu(Uhd)CfcGf | 1645 | VPusGfsgacUfcUfUfua | 1979 | CGACUUCC | 2313 | GGGACUCU | 2647 | CGACUUC | 2981 | UGGACUCU | 3315 | TCCGACTT | 3649 |
| 002973.3 | 114 | GfUfaaagagucscsa | | ccGfgAfagucgsgsa | | GGUAAAGA | | UUACCGGA | | CGGUAAA | | UUACCGGA | | CCGGTAAA | |
| | | | | | | GUCCC | | AGUCGGA | | GAGUCCA | | AGUCGGA | | GAGTCCC | |
| NM_ | 996- | asasugu(Ghd)AfaG | 1646 | VPusUfsuucAfcUfUfgu | 1980 | AAUGUGAA | 2314 | UUUUCACU | 2648 | AAUGUGA | 2982 | UUUUCACU | 3316 | CAAATGTG | 3650 |
| 002973.3 | 1018 | fUfAfcaagugaasasa | | acUfuCfacauususg | | GUACAAGU | | UGUACUUC | | AGUACAA | | UGUACUUC | | AAGTACAA | |
| | | | | | | GAAAA | | ACAUUUG | | GUGAAAA | | ACAUUUG | | GTGAAAA | |
| NM_ | 997- | asusgug(Ahd)AfgU | 1647 | VPusUfsuuuCfaCfUfug | 1981 | AUGUGAAG | 2315 | UUUUUCAC | 2649 | AUGUGAA | 2983 | UUUUUCAC | 3317 | AAATGTGA | 3651 |
| 002973.3 | 1019 | fAfCfaagugaaasasa | | uaCfuUfcacaususu | | UACAAGUG | | UUGUACUU | | GUACAAG | | UUGUACUU | | AGTACAAG | |
| | | | | | | AAAAA | | CACAUUU | | UGAAAAA | | CACAUUU | | TGAAAAA | |
| NM_ | 999- | gsusgaa(Ghd)UfaCf | 1648 | VPusAfsuuuUfuCfAfcu | 1982 | GUGAAGUA | 2316 | CAUUUUUC | 2650 | GUGAAGU | 2984 | UAUUUUUC | 3318 | ATGTGAAG | 3652 |
| 002973.3 | 1021 | AfAfgugaaaaasusa | | ugUfaCfuucacsasu | | CAAGUGAA | | ACUUGUAC | | ACAAGUG | | ACUUGUAC | | TACAAGTG | |
| | | | | | | AAAUG | | UUCACAU | | AAAAAUA | | UUCACAU | | AAAAATG | |
| NM_ | 1085- | csasuga(Ghd)AfaAf | 1649 | VPusGfsauuCfuGfUfac | 1983 | CAUGAGAA | 2317 | GGAUUCUG | 2651 | CAUGAGA | 2985 | UGAUUCUG | 3319 | CACATGAG | 3653 |
| 002973.3 | 1107 | AfGfuacagaauscsa | | uuUfuCfucaugsusg | | AAGUACAG | | UACUUUUC | | AAAGUAC | | UACUUUUC | | AAAAGTAC | |
| | | | | | | AAUCC | | UCAUGUG | | AGAAUCA | | UCAUGUG | | AGAATCC | |
| NM_ | 1744- | csascuu(Chd)UfcAf | 1650 | VPusAfsaucUfgAfAfgu | 1984 | CACUUCUC | 2318 | AAAUCUGA | 2652 | CACUUCU | 2986 | UAAUCUGA | 3320 | TCCACTTCT | 3654 |
| 002973.3 | 1766 | CfAfcuucagaususa | | guGfaGfaagugsgsa | | ACACUUCA | | AGUGUGAG | | CACACUU | | AGUGUGAG | | CACACTTC | |
| | | | | | | GAUUU | | AAGUGGA | | CAGAUUA | | AAGUGGA | | AGATTT | |
| NM_ | 1745- | ascsuuc(Uhd)CfaCf | 1651 | VPusAfsaauCfuGfAfag | 1985 | ACUUCUCA | 2319 | GAAAUCUG | 2653 | ACUUCUC | 2987 | UAAAUCUG | 3321 | CCACTTCT | 3655 |
| 002973.3 | 1767 | AfCfuucagauususa | | ugUfgAfgaagusgsg | | CACUUCAG | | AAGUGUGA | | ACACUUC | | AAGUGUGA | | CACACTTC | |
| | | | | | | AUUUC | | GAAGUGG | | AGAUUUA | | GAAGUGG | | AGATTTC | |
| NM_ | 1746- | csusucu(Chd)AfcAf | 1652 | VPusGfsaaaUfcUfGfaa | 1986 | CUUCUCAC | 2320 | UGAAAUCU | 2654 | CUUCUCA | 2988 | UGAAAUCU | 3322 | CACTTCTC | 3656 |
| 002973.3 | 1768 | CfUfucagauuuscsa | | guGfuGfagaagsusg | | ACUUCAGA | | GAAGUGUG | | CACUUCA | | GAAGUGUG | | ACACTTCA | |
| | | | | | | UUUCA | | AGAAGUG | | GAUUUCA | | AGAAGUG | | GATTTCA | |
| NM_ | 1747- | ususcuc(Ahd)CfaCf | 1653 | VPusUfsgaaAfuCfUfga | 1987 | UUCUCACA | 2321 | UUGAAAUC | 2655 | UUCUCAC | 2989 | UUGAAAUC | 3323 | ACTTCTCA | 3657 |
| 002973.3 | 1769 | UfUfcagauuucsasa | | agUfgUfgagaasgsu | | CUUCAGAU | | UGAAGUGU | | ACUUCAG | | UGAAGUGU | | CACTTCAG | |
| | | | | | | UUCAA | | GAGAAGU | | AUUUCAA | | GAGAAGU | | ATTTCAA | |
| NM_ | 1748- | uscsuca(Chd)AfcUf | 1654 | VPusUfsugaAfaUfCfug | 1988 | UCUCACAC | 2322 | GUUGAAAU | 2656 | UCUCACA | 2990 | UUUGAAAU | 3324 | CTTCTCAC | 3658 |
| 002973.3 | 1770 | UfCfagauuucasasa | | aaGfuGfugagasasg | | UUCAGAUU | | CUGAAGUG | | CUUCAGA | | CUGAAGUG | | ACTTCAGA | |
| | | | | | | UCAAC | | UGAGAAG | | UUUCAAA | | UGAGAAG | | TTTCAAC | |
| NM_ | 1749- | csuscac(Ahd)CfuUf | 1655 | VPusGfsuugAfaAfUfcu | 1989 | CUCACACU | 2323 | GGUUGAAA | 2657 | CUCACAC | 2991 | UGUUGAAA | 3325 | TTCTCACA | 3659 |
| 002973.3 | 1771 | CfAfgauuucaascsa | | gaAfgUfgugagsasa | | UCAGAUUU | | UCUGAAGU | | UUCAGAU | | UCUGAAGU | | CTTCAGAT | |
| | | | | | | CAACC | | GUGAGAA | | UUCAACA | | GUGAGAA | | TTCAACC | |
| NM_ | 1750- | uscsaca(Chd)UfuCf | 1656 | VPusGfsguuGfaAfAfuc | 1990 | UCACACUU | 2324 | GGGUUGAA | 2658 | UCACACU | 2992 | UGGUUGAA | 3326 | TCTCACAC | 3660 |
| 002973.3 | 1772 | AfGfauuucaacscsa | | ugAfaGfugugasgsa | | CAGAUUUC | | AUCUGAAG | | UCAGAUU | | AUCUGAAG | | TTCAGATT | |
| | | | | | | AACCC | | UGUGAGA | | UCAACCA | | UGUGAGA | | TCAACCC | |
| NM_ | 1751- | csascac(Uhd)UfcAf | 1657 | VPusGfsgguUfgAfAfa | 1991 | CACACUUC | 2325 | CGGGUUGA | 2659 | CACACUU | 2993 | UGGGUUGA | 3327 | CTCACACT | 3661 |
| 002973.3 | 1773 | GfAfuuucaaccscsa | | ucuGfaAfgugugsasg | | AGAUUUCA | | AAUCUGAA | | CAGAUUU | | AAUCUGAA | | TCAGATTT | |
| | | | | | | ACCCG | | GUGUGAG | | CAACCCA | | GUGUGAG | | CAACCCG | |
| NM_ | 1754- | ascsuuc(Ahd)GfaUf | 1658 | VPusUfsucgGfgUfUfga | 1992 | ACUUCAGA | 2326 | AUUCGGGU | 2660 | ACUUCAG | 2994 | UUUCGGGU | 3328 | ACACTTCA | 3662 |
| 002973.3 | 1776 | UfUfcaacccgasasa | | aaUfcUfgaagusgsu | | UUUCAACC | | UGAAAUCU | | AUUUCAA | | UGAAAUCU | | GATTTCAA | |
| | | | | | | CGAAU | | GAAGUGU | | CCCGAAA | | GAAGUGU | | CCCGAAT | |
| NM_ | 1781- | uscsaga(Chd)CfaAf | 1659 | VPusUfsuaaCfuAfCfuc | 1993 | UCAGACCA | 2327 | AUUAACUA | 2661 | UCAGACC | 2995 | UUUAACUA | 3329 | GTTCAGAC | 3663 |
| 002973.3 | 1803 | AfGfaguaguuasasa | | uuUfgGfucugasasc | | AAGAGUAG | | CUCUUUGG | | AAAGAGU | | CUCUUUGG | | CAAAGAGT | |
| | | | | | | UUAAU | | UCUGAAC | | AGUUAAA | | UCUGAAC | | AGTTAAT | |
| NM_ | 1782- | csasgac(Chd)AfaAf | 1660 | VPusAfsuuaAfcUfAfcu | 1994 | CAGACCAA | 2328 | CAUUAACU | 2662 | CAGACCA | 2996 | UAUUAACU | 3330 | TTCAGACC | 3664 |
| 002973.3 | 1804 | GfAfguaguuaasusa | | cuUfuGfgucugsasa | | AGAGUAGU | | ACUCUUUG | | AAGAGUA | | ACUCUUUG | | AAAGAGTA | |
| | | | | | | UAAUG | | GUCUGAA | | GUUAAUA | | GUCUGAA | | GTTAATG | |
| NM_ | 1984- | csuscua(Chd)UfaUf | 1661 | VPusUfsgcgUfuUfAfg | 1995 | CUCUACUA | 2329 | AUGCGUUU | 2663 | CUCUACU | 2997 | UUGCGUUU | 3331 | GTCTCTAC | 3665 |
| 002973.3 | 2006 | GfCfcuaaacgcsasa | | gcaUfaGfuagagsasc | | UGCCUAAA | | AGGCAUAG | | AUGCCUA | | AGGCAUAG | | TATGCCTA | |
| | | | | | | CGCAU | | UAGAGAC | | AACGCAA | | UAGAGAC | | AACGCAT | |
| NM_ | 1985- | uscsuac(Uhd)AfuG | 1662 | VPusAfsugcGfuUfUfag | 1996 | UCUACUAU | 2330 | CAUGCGUU | 2664 | UCUACUA | 2998 | UAUGCGUU | 3332 | TCTCTACT | 3666 |
| 002973.3 | 2007 | fCfCfuaaacgcasusa | | gcAfuAfguagasgsa | | GCCUAAAC | | UAGGCAUA | | UGCCUAA | | UAGGCAUA | | ATGCCTAA | |
| | | | | | | GCAUG | | GUAGAGA | | ACGCAUA | | GUAGAGA | | ACGCATG | |
| NM_ | 1987- | usascua(Uhd)GfcCf | 1663 | VPusAfscauGfcGfUfuu | 1997 | UACUAUGC | 2331 | GACAUGCG | 2665 | UACUAUG | 2999 | UACAUGCG | 3333 | TCTACTAT | 3667 |
| 002973.3 | 2009 | UfAfaacgcaugsusa | | agGfcAfuaguasgsa | | CUAAACGC | | UUUAGGCA | | CCUAAAC | | UUUAGGCA | | GCCTAAAC | |
| | | | | | | AUGUC | | UAGUAGA | | GCAUGUA | | UAGUAGA | | GCATGTC | |
| NM_ | 2592- | csusucu(Ghd)AfaU | 1664 | VPusUfsugaUfcCfAfua | 1998 | CUUCUGAA | 2332 | GUUGAUCC | 2666 | CUUCUGA | 3000 | UUUGAUCC | 3334 | TACTTCTG | 3668 |
| 002973.3 | 2614 | fCfUfauggaucasasa | | gaUfuCfagaagsusa | | UCUAUGGA | | AUAGAUUC | | AUCUAUG | | AUAGAUUC | | AATCTATG | |
| | | | | | | UCAAC | | AGAAGUA | | GAUCAAA | | AGAAGUA | | GATCAAC | |
| NM_ | 2593- | ususcug(Ahd)AfuC | 1665 | VPusGfsuugAfuCfCfau | 1999 | UUCUGAAU | 2333 | AGUUGAUC | 2667 | UUCUGAA | 3001 | UGUUGAUC | 3335 | ACTTCTGA | 3669 |
| 002973.3 | 2615 | fUfAfuggaucaascsa | | agAfuUfcagaasgsu | | CUAUGGAU | | CAUAGAUU | | UCUAUGG | | CAUAGAUU | | ATCTATGG | |
| | | | | | | CAACU | | CAGAAGU | | AUCAACA | | CAGAAGU | | ATCAACT | |
| NM_ | 2594- | uscsuga(Ahd)UfcU | 1666 | VPusAfsguuGfaUfCfca | 2000 | UCUGAAUC | 2334 | UAGUUGAU | 2668 | UCUGAAU | 3002 | UAGUUGAU | 3336 | CTTCTGAA | 3670 |
| 002973.3 | 2616 | fAfUfggaucaacsusa | | uaGfaUfucagasasg | | UAUGGAUC | | CCAUAGAU | | CUAUGGA | | CCAUAGAU | | TCTATGGA | |
| | | | | | | AACUA | | UCAGAAG | | UCAACUA | | UCAGAAG | | TCAACTA | |
| NM_ | 2595- | csusgaa(Uhd)CfuAf | 1667 | VPusUfsaguUfgAfUfcc | 2001 | CUGAAUCU | 2335 | GUAGUUGA | 2669 | CUGAAUC | 3003 | UUAGUUGA | 3337 | TTCTGAAT | 3671 |
| 002973.3 | 2617 | UfGfgaucaacusasa | | auAfgAfuucagsasa | | AUGGAUCA | | UCCAUAGA | | UAUGGAU | | UCCAUAGA | | CTATGGAT | |
| | | | | | | ACUAC | | UUCAGAA | | CAACUAA | | UUCAGAA | | CAACTAC | |
| NM_ | 2596- | usgsaau(Chd)UfaUf | 1668 | VPusGfsuagUfuGfAfuc | 2002 | UGAAUCUA | 2336 | AGUAGUUG | 2670 | UGAAUCU | 3004 | UGUAGUUG | 3338 | TCTGAATC | 3672 |
| 002973.3 | 2618 | GfGfaucaacuascsa | | caUfaGfauucasgsa | | UGGAUCAA | | AUCCAUAG | | AUGGAUC | | AUCCAUAG | | TATGGATC | |
| | | | | | | CUACU | | AUUCAGA | | AACUACA | | AUUCAGA | | AACTACT | |
| NM_ | 2597- | gsasauc(Uhd)AfuG | 1669 | VPusAfsguaGfuUfGfau | 2003 | GAAUCUAU | 2337 | UAGUAGUU | 2671 | GAAUCUA | 3005 | UAGUAGUU | 3339 | CTGAATCT | 3673 |
| 002973.3 | 2619 | fGfAfucaacuacsusa | | ccAfuAfgauucsasg | | GGAUCAAC | | GAUCCAUA | | UGGAUCA | | GAUCCAUA | | ATGGATCA | |
| | | | | | | UACUA | | GAUUCAG | | ACUACUA | | GAUUCAG | | ACTACTA | |
| NM_ | 2598- | asasucu(Ahd)UfgG | 1670 | VPusUfsaguAfgUfUfga | 2004 | AAUCUAUG | 2338 | UUAGUAGU | 2672 | AAUCUAU | 3006 | UUAGUAGU | 3340 | TGAATCTA | 3674 |
| 002973.3 | 2620 | fAfUfcaacuacusasa | | ucCfaUfagauuscsa | | GAUCAACU | | UGAUCCAU | | GGAUCAA | | UGAUCCAU | | TGGATCAA | |
| | | | | | | ACUAA | | AGAUUCA | | CUACUAA | | AGAUUCA | | CTACTAA | |
| NM_ | 2599- | asuscua(Uhd)GfgA | 1671 | VPusUfsuagUfaGfUfug | 2005 | AUCUAUGG | 2339 | UUUAGUAG | 2673 | AUCUAUG | 3007 | UUUAGUAG | 3341 | GAATCTAT | 3675 |
| 002973.3 | 2621 | fUfCfaacuacuasasa | | auCfcAfuagaususc | | AUCAACUA | | UUGAUCCA | | GAUCAAC | | UUGAUCCA | | GGATCAAC | |
| | | | | | | CUAAA | | UAGAUUC | | UACUAAA | | UAGAUUC | | TACTAAA | |
| NM_ | 3102- | usasuac(Chd)CfaAf | 1672 | VPusCfsgucAfuAfGfgu | 2006 | UAUACCCA | 2340 | GCGUCAUA | 2674 | UAUACCC | 3008 | UCGUCAUA | 3342 | TTTATACC | 3676 |
| 002973.3 | 3124 | UfAfccuaugacsgsa | | auUfgGfguauasasa | | AUACCUAU | | GGUAUUGG | | AAUACCU | | GGUAUUGG | | CAATACCT | |
| | | | | | | GACGC | | GUAUAAA | | AUGACGA | | GUAUAAA | | ATGACGC | |
| NM_ | 3145- | gsascau(Ahd)UfaGf | 1673 | VPusUfsuggUfaCfUfgc | 2007 | GACAUAUA | 2341 | UUUGGUAC | 2675 | GACAUAU | 3009 | UUUGGUAC | 3343 | AAGACATA | 3677 |
| 002973.3 | 3167 | AfGfcaguaccasasa | | ucUfaUfaugucsusu | | GAGCAGUA | | UGCUCUAU | | AGAGCAG | | UGCUCUAU | | TAGAGCAG | |
| | | | | | | CCAAA | | AUGUCUU | | UACCAAA | | AUGUCUU | | TACCAAA | |
| NM_ | 3148- | asusaua(Ghd)AfgCf | 1674 | VPusUfsauuUfgGfUfac | 2008 | AUAUAGAG | 2342 | AUAUUUGG | 2676 | AUAUAGA | 3010 | UUAUUUGG | 3344 | ACATATAG | 3678 |
| 002973.3 | 3170 | AfGfuaccaaausasa | | ugCfuCfuauausgsu | | CAGUACCA | | UACUGCUC | | GCAGUAC | | UACUGCUC | | AGCAGTAC | |
| | | | | | | AAUAU | | UAUAUGU | | CAAAUAA | | UAUAUGU | | CAAATAT | |
| NM_ | 3149- | usasuag(Ahd)GfcA | 1675 | VPusAfsuauUfuGfGfua | 2009 | UAUAGAGC | 2343 | CAUAUUUG | 2677 | UAUAGAG | 3011 | UAUAUUUG | 3345 | CATATAGA | 3679 |
| 002973.3 | 3171 | fGfUfaccaaauasusa | | cuGfcUfcuauasusg | | AGUACCAA | | GUACUGCU | | CAGUACC | | GUACUGCU | | GCAGTACC | |
| | | | | | | AUAUG | | CUAUAUG | | AAAUAUA | | CUAUAUG | | AAATATG | |
| NM_ | 3150- | asusaga(Ghd)CfaGf | 1676 | VPusCfsauaUfuUfGfgu | 2010 | AUAGAGCA | 2344 | GCAUAUUU | 2678 | AUAGAGC | 3012 | UCAUAUUU | 3346 | ATATAGAG | 3680 |
| 002973.3 | 3172 | UfAfccaaauausgsa | | acUfgCfucuausasu | | GUACCAAA | | GGUACUGC | | AGUACCA | | GGUACUGC | | CAGTACCA | |
| | | | | | | UAUGC | | UCUAUAU | | AAUAUGA | | UCUAUAU | | AATATGC | |
| NM_ | 3152- | asgsagc(Ahd)GfuA | 1677 | VPusGfsgcaUfaUfUfug | 2011 | AGAGCAGU | 2345 | GGGCAUAU | 2679 | AGAGCAG | 3013 | UGGCAUAU | 3347 | ATAGAGCA | 3681 |
| 002973.3 | 3174 | fCfCfaaauaugcscsa | | guAfcUfgcucusasu | | ACCAAAUA | | UUGGUACU | | UACCAAA | | UUGGUACU | | GTACCAAA | |
| | | | | | | UGCCC | | GCUCUAU | | UAUGCCA | | GCUCUAU | | TATGCCC | |
| NM_ | 3479- | usgsucc(Chd)AfaAf | 1678 | VPusUfsuguAfuGfGfu | 2012 | UGUCCCAA | 2346 | GUUGUAUG | 2680 | UGUCCCA | 3014 | UUUGUAUG | 3348 | CATGTCCC | 3682 |
| 002973.3 | 3501 | UfUfaccauacasasa | | aauUfuGfggacasusg | | AUUACCAU | | GUAAUUUG | | AAUUACC | | GUAAUUUG | | AAATTACC | |
| | | | | | | ACAAC | | GGACAUG | | AUACAAA | | GGACAUG | | ATACAAC | |
| NM_ | 3481- | uscscca(Ahd)AfuUf | 1679 | VPusUfsguuGfuAfUfg | 2013 | UCCCAAAU | 2347 | UUGUUGUA | 2681 | UCCCAAA | 3015 | UUGUUGUA | 3349 | TGTCCCAA | 3683 |
| 002973.3 | 3503 | AfCfcauacaacsasa | | guaAfuUfugggascsa | | UACCAUAC | | UGGUAAUU | | UUACCAU | | UGGUAAUU | | ATTACCAT | |
| | | | | | | AACAA | | UGGGACA | | ACAACAA | | UGGGACA | | ACAACAA | |
| NM_ | 3508- | asasgcc(Chd)UfuCf | 1680 | VPusCfsaaaGfuAfGfaa | 2014 | AAGCCCUU | 2348 | GCAAAGUA | 2682 | AAGCCCU | 3016 | UCAAAGUA | 3350 | ACAAGCCC | 3684 |
| 002973.3 | 3530 | UfUfucuacuuusgsa | | agAfaGfggcuusgsu | | CUUUCUAC | | GAAAGAAG | | UCUUUCU | | GAAAGAAG | | TTCTTTCTA | |
| | | | | | | UUUGC | | GGCUUGU | | ACUUUGA | | GGCUUGU | | CTTTGC | |
| NM_ | 3511- | cscscuu(Chd)UfuUf | 1681 | VPusUfsggcAfaAfGfua | 2015 | CCCUUCUU | 2349 | AUGGCAAA | 2683 | CCCUUCU | 3017 | UUGGCAAA | 3351 | AGCCCTTC | 3685 |
| 002973.3 | 3533 | CfUfacuuugccsasa | | gaAfaGfaagggscsu | | UCUACUUU | | GUAGAAAG | | UUCUACU | | GUAGAAAG | | TTTCTACTT | |
| | | | | | | GCCAU | | AAGGGCU | | UUGCCAA | | AAGGGCU | | TGCCAT | |
| NM_ | 3512- | cscsuuc(Uhd)UfuCf | 1682 | VPusAfsuggCfaAfAfgu | 2016 | CCUUCUUU | 2350 | AAUGGCAA | 2684 | CCUUCUU | 3018 | UAUGGCAA | 3352 | GCCCTTCTT | 3686 |
| 002973.3 | 3534 | UfAfcuuugccasusa | | agAfaAfgaaggsgsc | | CUACUUUG | | AGUAGAAA | | UCUACUU | | AGUAGAAA | | TCTACTTTG | |
| | | | | | | CCAUU | | GAAGGGC | | UGCCAUA | | GAAGGGC | | CCATT | |
| NM_ | 3513- | csusucu(Uhd)UfcU | 1683 | VPusAfsaugGfcAfAfag | 2017 | CUUCUUUC | 2351 | AAAUGGCA | 2685 | CUUCUUU | 3019 | UAAUGGCA | 3353 | CCCTTCTTT | 3687 |
| 002973.3 | 3535 | fAfCfuuugccaususa | | uaGfaAfagaagsgsg | | UACUUUGC | | AAGUAGAA | | CUACUUU | | AAGUAGAA | | CTACTTTG | |
| | | | | | | CAUUU | | AGAAGGG | | GCCAUUA | | AGAAGGG | | CCATTT | |
| NM_ | 3514- | ususcuu(Uhd)CfuA | 1684 | VPusAfsaauGfgCfAfaa | 2018 | UUCUUUCU | 2352 | GAAAUGGC | 2686 | UUCUUUC | 3020 | UAAAUGGC | 3354 | CCTTCTTTC | 3688 |
| 002973.3 | 3536 | fCfUfuugccauususa | | guAfgAfaagaasgsg | | ACUUUGCC | | AAAGUAGA | | UACUUUG | | AAAGUAGA | | TACTTTGC | |
| | | | | | | AUUUC | | AAGAAGG | | CCAUUUA | | AAGAAGG | | CATTTC | |
| NM_ | 3515- | uscsuuu(Chd)UfaCf | 1685 | VPusGfsaaaUfgGfCfaa | 2019 | UCUUUCUA | 2353 | GGAAAUGG | 2687 | UCUUUCU | 3021 | UGAAAUGG | 3355 | CTTCTTTCT | 3689 |
| 002973.3 | 3537 | UfUfugccauuuscsa | | agUfaGfaaagasasg | | CUUUGCCA | | CAAAGUAG | | ACUUUGC | | CAAAGUAG | | ACTTTGCC | |
| | | | | | | UUUCC | | AAAGAAG | | CAUUUCA | | AAAGAAG | | ATTTCC | |
| NM_ | 3516- | csusuuc(Uhd)AfcU | 1686 | VPusGfsgaaAfuGfGfca | 2020 | CUUUCUAC | 2354 | UGGAAAUG | 2688 | CUUUCUA | 3022 | UGGAAAUG | 3356 | TTCTTTCTA | 3690 |
| 002973.3 | 3538 | fUfUfgccauuucscsa | | aaGfuAfgaaagsasa | | UUUGCCAU | | GCAAAGUA | | CUUUGCC | | GCAAAGUA | | CTTTGCCA | |
| | | | | | | UUCCA | | GAAAGAA | | AUUUCCA | | GAAAGAA | | TTTCCA | |
| NM_ | 3517- | ususucu(Ahd)CfuU | 1687 | VPusUfsggaAfaUfGfgc | 2021 | UUUCUACU | 2355 | GUGGAAAU | 2689 | UUUCUAC | 3023 | UUGGAAAU | 3357 | TCTTTCTAC | 3691 |
| 002973.3 | 3539 | fUfGfccauuuccsasa | | aaAfgUfagaaasgsa | | UUGCCAUU | | GGCAAAGU | | UUUGCCA | | GGCAAAGU | | TTTGCCATT | |
| | | | | | | UCCAC | | AGAAAGA | | UUUCCAA | | AGAAAGA | | TCCAC | |
| NM_ | 3518- | ususcua(Chd)UfuU | 1688 | VPusGfsuggAfaAfUfg | 2022 | UUCUACUU | 2356 | CGUGGAAA | 2690 | UUCUACU | 3024 | UGUGGAAA | 3358 | CTTTCTACT | 3692 |
| 002973.3 | 3540 | fGfCfcauuuccascsa | | gcaAfaGfuagaasasg | | UGCCAUUU | | UGGCAAAG | | UUGCCAU | | UGGCAAAG | | TTGCCATTT | |
| | | | | | | CCACG | | UAGAAAG | | UUCCACA | | UAGAAAG | | CCACG | |
| NM_ | 3908- | csasugu(Ahd)CfaGf | 1689 | VPusAfsccaUfuCfCfug | 2023 | CAUGUACA | 2357 | AACCAUUC | 2691 | CAUGUAC | 3025 | UACCAUUC | 3359 | CTCATGTA | 3693 |
| 002973.3 | 3930 | UfCfaggaauggsusa | | acUfgUfacaugsasg | | GUCAGGAA | | CUGACUGU | | AGUCAGG | | CUGACUGU | | CAGTCAGG | |
| | | | | | | UGGUU | | ACAUGAG | | AAUGGUA | | ACAUGAG | | AATGGTT | |
| NM_ | 3909- | asusgua(Chd)AfgU | 1690 | VPusAfsaccAfuUfCfcu | 2024 | AUGUACAG | 2358 | GAACCAUU | 2692 | AUGUACA | 3026 | UAACCAUU | 3360 | TCATGTAC | 3694 |
| 002973.3 | 3931 | fCfAfggaauggususa | | gaCfuGfuacausgsa | | UCAGGAAU | | CCUGACUG | | GUCAGGA | | CCUGACUG | | AGTCAGGA | |
| | | | | | | GGUUC | | UACAUGA | | AUGGUUA | | UACAUGA | | ATGGTTC | |
| NM_ | 3910- | usgsuac(Ahd)GfuC | 1691 | VPusGfsaacCfaUfUfcc | 2025 | UGUACAGU | 2359 | GGAACCAU | 2693 | UGUACAG | 3027 | UGAACCAU | 3361 | CATGTACA | 3695 |
| 002973.3 | 3932 | fAfGfgaaugguuscsa | | ugAfcUfguacasusg | | CAGGAAUG | | UCCUGACU | | UCAGGAA | | UCCUGACU | | GTCAGGAA | |
| | | | | | | GUUCC | | GUACAUG | | UGGUUCA | | GUACAUG | | TGGTTCC | |
| NM_ | 3918- | csasgga(Ahd)UfgG | 1692 | VPusAfsugaGfaAfGfga | 2026 | CAGGAAUG | 2360 | GAUGAGAA | 2694 | CAGGAAU | 3028 | UAUGAGAA | 3362 | GTCAGGAA | 3696 |
| 002973.3 | 3940 | fUfUfccuucucasusa | | acCfaUfuccugsasc | | GUUCCUUC | | GGAACCAU | | GGUUCCU | | GGAACCAU | | TGGTTCCTT | |
| | | | | | | UCAUC | | UCCUGAC | | UCUCAUA | | UCCUGAC | | CTCATC | |
| NM_ | 3921- | gsasaug(Ghd)UfuC | 1693 | VPusUfsggaUfgAfGfaa | 2027 | GAAUGGUU | 2361 | UUGGAUGA | 2695 | GAAUGGU | 3029 | UUGGAUGA | 3363 | AGGAATGG | 3697 |
| 002973.3 | 3943 | fCfUfucucauccsasa | | ggAfaCfcauucscsu | | CCUUCUCA | | GAAGGAAC | | UCCUUCU | | GAAGGAAC | | TTCCTTCTC | |
| | | | | | | UCCAA | | CAUUCCU | | CAUCCAA | | CAUUCCU | | ATCCAA | |
| NM_ | 3923- | asusggu(Uhd)CfcU | 1694 | VPusGfsuugGfaUfGfag | 2028 | AUGGUUCC | 2362 | AGUUGGAU | 2696 | AUGGUUC | 3030 | UGUUGGAU | 3364 | GAATGGTT | 3698 |
| 002973.3 | 3945 | fUfCfucauccaascsa | | aaGfgAfaccaususc | | UUCUCAUC | | GAGAAGGA | | CUUCUCA | | GAGAAGGA | | CCTTCTCAT | |
| | | | | | | CAACU | | ACCAUUC | | UCCAACA | | ACCAUUC | | CCAACT | |
| NM_ | 3924- | usgsguu(Chd)CfuU | 1695 | VPusAfsguuGfgAfUfg | 2029 | UGGUUCCU | 2363 | CAGUUGGA | 2697 | UGGUUCC | 3031 | UAGUUGGA | 3365 | AATGGTTC | 3699 |
| 002973.3 | 3946 | fCfUfcauccaacsusa | | agaAfgGfaaccasusu | | UCUCAUCC | | UGAGAAGG | | UUCUCAU | | UGAGAAGG | | CTTCTCATC | |
| | | | | | | AACUG | | AACCAUU | | CCAACUA | | AACCAUU | | CAACTG | |
| NM_ | 3926- | gsusucc(Uhd)UfcU | 1696 | VPusGfscagUfuGfGfau | 2030 | GUUCCUUC | 2364 | GGCAGUUG | 2698 | GUUCCUU | 3032 | UGCAGUUG | 3366 | TGGTTCCTT | 3700 |
| 002973.3 | 3948 | fCfAfuccaacugscsa | | gaGfaAfggaacscsa | | UCAUCCAA | | GAUGAGAA | | CUCAUCC | | GAUGAGAA | | CTCATCCA | |
| | | | | | | CUGCC | | GGAACCA | | AACUGCA | | GGAACCA | | ACTGCC | |
| NM_ | 3947- | csasugc(Ghd)CfcAf | 1697 | VPusAfsuuaGfcAfUfca | 2031 | CAUGCGCC | 2365 | CAUUAGCA | 2699 | CAUGCGC | 3033 | UAUUAGCA | 3367 | CCCATGCG | 3701 |
| 002973.3 | 3969 | AfUfgaugcuaasusa | | uuGfgCfgcaugsgsg | | AAUGAUGC | | UCAUUGGC | | CAAUGAU | | UCAUUGGC | | CCAATGAT | |
| | | | | | | UAAUG | | GCAUGGG | | GCUAAUA | | GCAUGGG | | GCTAATG | |
| NM_ | 3950- | gscsgcc(Ahd)AfuG | 1698 | VPusGfsucaUfuAfGfca | 2032 | GCGCCAAU | 2366 | CGUCAUUA | 2700 | GCGCCAA | 3034 | UGUCAUUA | 3368 | ATGCGCCA | 3702 |
| 002973.3 | 3972 | fAfUfgcuaaugascsa | | ucAfuUfggcgcsasu | | GAUGCUAA | | GCAUCAUU | | UGAUGCU | | GCAUCAUU | | ATGATGCT | |
| | | | | | | UGACG | | GGCGCAU | | AAUGACA | | GGCGCAU | | AATGACG | |
| NM_ | 3952- | gscscaa(Uhd)GfaUf | 1699 | VPusUfscguCfaUfUfag | 2033 | GCCAAUGA | 2367 | GUCGUCAU | 2701 | GCCAAUG | 3035 | UUCGUCAU | 3369 | GCGCCAAT | 3703 |
| 002973.3 | 3974 | GfCfuaaugacgsasa | | caUfcAfuuggcsgsc | | UGCUAAUG | | UAGCAUCA | | AUGCUAA | | UAGCAUCA | | GATGCTAA | |
| | | | | | | ACGAC | | UUGGCGC | | UGACGAA | | UUGGCGC | | TGACGAC | |
| NM_ | 3953- | cscsaau(Ghd)AfuGf | 1700 | VPusGfsucgUfcAfUfua | 2034 | CCAAUGAU | 2368 | UGUCGUCA | 2702 | CCAAUGA | 3036 | UGUCGUCA | 3370 | CGCCAATG | 3704 |
| 002973.3 | 3975 | CfUfaaugacgascsa | | gcAfuCfauuggscsg | | GCUAAUGA | | UUAGCAUC | | UGCUAAU | | UUAGCAUC | | ATGCTAAT | |
| | | | | | | CGACA | | AUUGGCG | | GACGACA | | AUUGGCG | | GACGACA | |
| NM_ | 3956- | asusgau(Ghd)CfuA | 1701 | VPusUfsgugUfcGfUfca | 2035 | AUGAUGCU | 2369 | CUGUGUCG | 2703 | AUGAUGC | 3037 | UUGUGUCG | 3371 | CAATGATG | 3705 |
| 002973.3 | 3978 | fAfUfgacgacacsasa | | uuAfgCfaucaususg | | AAUGACGA | | UCAUUAGC | | UAAUGAC | | UCAUUAGC | | CTAATGAC | |
| | | | | | | CACAG | | AUCAUUG | | GACACAA | | AUCAUUG | | GACACAG | |
| NM_ | 3957- | usgsaug(Chd)UfaA | 1702 | VPusCfsuguGfuCfGfuc | 2036 | UGAUGCUA | 2370 | GCUGUGUC | 2704 | UGAUGCU | 3038 | UCUGUGUC | 3372 | AATGATGC | 3706 |
| 002973.3 | 3979 | fUfGfacgacacasgsa | | auUfaGfcaucasusu | | AUGACGAC | | GUCAUUAG | | AAUGACG | | GUCAUUAG | | TAATGACG | |
| | | | | | | ACAGC | | CAUCAUU | | ACACAGA | | CAUCAUU | | ACACAGC | |
| NM_ | 4003- | csgscuc(Ahd)AfaGf | 1703 | VPusGfscugUfaGfUfgc | 2037 | CGCUCAAA | 2371 | GGCUGUAG | 2705 | CGCUCAA | 3039 | UGCUGUAG | 3373 | CTCGCTCA | 3707 |
| 002973.3 | 4025 | UfGfcacuacagscsa | | acUfuUfgagcgsasg | | GUGCACUA | | UGCACUUU | | AGUGCAC | | UGCACUUU | | AAGTGCAC | |
| | | | | | | CAGCC | | GAGCGAG | | UACAGCA | | GAGCGAG | | TACAGCC | |
| NM_ | 4020- | asgsccc(Ahd)UfuCf | 1704 | VPusUfsgucGfaGfAfcu | 2038 | AGCCCAUU | 2372 | UUGUCGAG | 2706 | AGCCCAU | 3040 | UUGUCGAG | 3374 | ACAGCCCA | 3708 |
| 002973.3 | 4042 | CfAfgucucgacsasa | | ggAfaUfgggcusgsu | | CCAGUCUC | | ACUGGAAU | | UCCAGUC | | ACUGGAAU | | TTCCAGTC | |
| | | | | | | GACAA | | GGGCUGU | | UCGACAA | | GGGCUGU | | TCGACAA | |
| NM_ | 4022- | cscscau(Uhd)CfcAf | 1705 | VPusGfsuugUfcGfAfga | 2039 | CCCAUUCC | 2373 | UGUUGUCG | 2707 | CCCAUUC | 3041 | UGUUGUCG | 3375 | AGCCCATT | 3709 |
| 002973.3 | 4044 | GfUfcucgacaascsa | | cuGfgAfaugggscsu | | AGUCUCGA | | AGACUGGA | | CAGUCUC | | AGACUGGA | | CCAGTCTC | |
| | | | | | | CAACA | | AUGGGCU | | GACAACA | | AUGGGCU | | GACAACA | |
| NM_ | 4082- | csascca(Chd)CfaAf | 1706 | VPusUfsacaAfcUfGfcu | 2040 | CACCACCA | 2374 | UUACAACU | 2708 | CACCACC | 3042 | UUACAACU | 3376 | CCCACCAC | 3710 |
| 002973.3 | 4104 | CfAfgcaguugusasa | | guUfgGfuggugsgsg | | ACAGCAGU | | GCUGUUGG | | AACAGCA | | GCUGUUGG | | CAACAGCA | |
| | | | | | | UGUAA | | UGGUGGG | | GUUGUAA | | UGGUGGG | | GTTGTAA | |
| NM_ | 4083- | ascscac(Chd)AfaCf | 1707 | VPusUfsuacAfaCfUfgc | 2041 | ACCACCAA | 2375 | CUUACAAC | 2709 | ACCACCA | 3043 | UUUACAAC | 3377 | CCACCACC | 3711 |
| 002973.3 | 4105 | AfGfcaguuguasasa | | ugUfuGfguggusgsg | | CAGCAGUU | | UGCUGUUG | | ACAGCAG | | UGCUGUUG | | AACAGCAG | |
| | | | | | | GUAAG | | GUGGUGG | | UUGUAAA | | GUGGUGG | | TTGTAAG | |
| NM_ | 4084- | cscsacc(Ahd)AfcAf | 1708 | VPusCfsuuaCfaAfCfug | 2042 | CCACCAAC | 2376 | CCUUACAA | 2710 | CCACCAA | 3044 | UCUUACAA | 3378 | CACCACCA | 3712 |
| 002973.3 | 4106 | GfCfaguuguaasgsa | | cuGfuUfgguggsusg | | AGCAGUUG | | CUGCUGUU | | CAGCAGU | | CUGCUGUU | | ACAGCAGT | |
| | | | | | | UAAGG | | GGUGGUG | | UGUAAGA | | GGUGGUG | | TGTAAGG | |
| NM_ | 4086- | ascscaa(Chd)AfgCf | 1709 | VPusGfsccuUfaCfAfac | 2043 | ACCAACAG | 2377 | AGCCUUAC | 2711 | ACCAACA | 3045 | UGCCUUAC | 3379 | CCACCAAC | 3713 |
| 002973.3 | 4108 | AfGfuuguaaggscsa | | ugCfuGfuuggusgsg | | CAGUUGUA | | AACUGCUG | | GCAGUUG | | AACUGCUG | | AGCAGTTG | |
| | | | | | | AGGCU | | UUGGUGG | | UAAGGCA | | UUGGUGG | | TAAGGCT | |
| NM_ | 4088- | csasaca(Ghd)CfaGf | 1710 | VPusCfsagcCfuUfAfca | 2044 | CAACAGCA | 2378 | GCAGCCUU | 2712 | CAACAGC | 3046 | UCAGCCUU | 3380 | ACCAACAG | 3714 |
| 002973.3 | 4110 | UfUfguaaggcusgsa | | acUfgCfuguugsgsu | | GUUGUAAG | | ACAACUGC | | AGUUGUA | | ACAACUGC | | CAGTTGTA | |
| | | | | | | GCUGC | | UGUUGGU | | AGGCUGA | | UGUUGGU | | AGGCTGC | |
| NM_ | 4143- | csusucu(Ahd)CfuG | 1711 | VPusGfsuugGfuAfGfaa | 2045 | CUUCUACU | 2379 | AGUUGGUA | 2713 | CUUCUAC | 3047 | UGUUGGUA | 3381 | CCCTTCTA | 3715 |
| 002973.3 | 4165 | fCfUfucuaccaascsa | | gcAfgUfagaagsgsg | | GCUUCUAC | | GAAGCAGU | | UGCUUCU | | GAAGCAGU | | CTGCTTCT | |
| | | | | | | CAACU | | AGAAGGG | | ACCAACA | | AGAAGGG | | ACCAACT | |
| NM_ | 4145- | uscsuac(Uhd)GfcUf | 1712 | VPusCfsaguUfgGfUfag | 2046 | UCUACUGC | 2380 | CCAGUUGG | 2714 | UCUACUG | 3048 | UCAGUUGG | 3382 | CTTCTACT | 3716 |
| 002973.3 | 4167 | UfCfuaccaacusgsa | | aaGfcAfguagasasg | | UUCUACCA | | UAGAAGCA | | CUUCUAC | | UAGAAGCA | | GCTTCTAC | |
| | | | | | | ACUGG | | GUAGAAG | | CAACUGA | | GUAGAAG | | CAACTGG | |
| NM_ | 4146- | csusacu(Ghd)CfuUf | 1713 | VPusCfscagUfuGfGfua | 2047 | CUACUGCU | 2381 | UCCAGUUG | 2715 | CUACUGC | 3049 | UCCAGUUG | 3383 | TTCTACTG | 3717 |
| 002973.3 | 4168 | CfUfaccaacugsgsa | | gaAfgCfaguagsasa | | UCUACCAA | | GUAGAAGC | | UUCUACC | | GUAGAAGC | | CTTCTACC | |
| | | | | | | CUGGA | | AGUAGAA | | AACUGGA | | AGUAGAA | | AACTGGA | |
| NM_ | 4149- | csusgcu(Uhd)CfuA | 1714 | VPusCfsuucCfaGfUfug | 2048 | CUGCUUCU | 2382 | GCUUCCAG | 2716 | CUGCUUC | 3050 | UCUUCCAG | 3384 | TACTGCTT | 3718 |
| 002973.3 | 4171 | fCfCfaacuggaasgsa | | guAfgAfagcagsusa | | ACCAACUG | | UUGGUAGA | | UACCAAC | | UUGGUAGA | | CTACCAAC | |
| | | | | | | GAAGC | | AGCAGUA | | UGGAAGA | | AGCAGUA | | TGGAAGC | |
| NM_ | 4159- | csasacu(Ghd)GfaAf | 1715 | VPusGfsuuuUfcUfGfu | 2049 | CAACUGGA | 2383 | AGUUUUCU | 2717 | CAACUGG | 3051 | UGUUUUCU | 3385 | ACCAACTG | 3719 |
| 002973.3 | 4181 | GfCfacagaaaascsa | | gcuUfcCfaguugsgsu | | AGCACAGA | | GUGCUUCC | | AAGCACA | | GUGCUUCC | | GAAGCACA | |
| | | | | | | AAACU | | AGUUGGU | | GAAAACA | | AGUUGGU | | GAAAACT | |
| NM_ | 4215- | ususgau(Uhd)UfcU | 1716 | VPusUfsggaUfgUfUfac | 2050 | UUGAUUUC | 2384 | UUGGAUGU | 2718 | UUGAUUU | 3052 | UUGGAUGU | 3386 | TGTTGATTT | 3720 |
| 002973.3 | 4237 | fUfGfuaacauccsasa | | aaGfaAfaucaascsa | | UUGUAACA | | UACAAGAA | | CUUGUAA | | UACAAGAA | | CTTGTAAC | |
| | | | | | | UCCAA | | AUCAACA | | CAUCCAA | | AUCAACA | | ATCCAA | |
| NM_ | 4218- | asusuuc(Uhd)UfgU | 1717 | VPusUfsauuGfgAfUfg | 2051 | AUUUCUUG | 2385 | CUAUUGGA | 2719 | AUUUCUU | 3053 | UUAUUGGA | 3387 | TGATTTCTT | 3721 |
| 002973.3 | 4240 | fAfAfcauccaausasa | | uuaCfaAfgaaauscsa | | UAACAUCC | | UGUUACAA | | GUAACAU | | UGUUACAA | | GTAACATC | |
| | | | | | | AAUAG | | GAAAUCA | | CCAAUAA | | GAAAUCA | | CAATAG | |
| NM_ | 4220- | ususcuu(Ghd)UfaA | 1718 | VPusCfscuaUfuGfGfau | 2052 | UUCUUGUA | 2386 | UCCUAUUG | 2720 | UUCUUGU | 3054 | UCCUAUUG | 3388 | ATTTCTTGT | 3722 |
| 002973.3 | 4242 | fCfAfuccaauagsgsa | | guUfaCfaagaasasu | | ACAUCCAA | | GAUGUUAC | | AACAUCC | | GAUGUUAC | | AACATCCA | |
| | | | | | | UAGGA | | AAGAAAU | | AAUAGGA | | AAGAAAU | | ATAGGA | |
| NM_ | 4221- | uscsuug(Uhd)AfaC | 1719 | VPusUfsccuAfuUfGfga | 2053 | UCUUGUAA | 2387 | UUCCUAUU | 2721 | UCUUGUA | 3055 | UUCCUAUU | 3389 | TTTCTTGTA | 3723 |
| 002973.3 | 4243 | fAfUfccaauaggsasa | | ugUfuAfcaagasasa | | CAUCCAAU | | GGAUGUUA | | ACAUCCA | | GGAUGUUA | | ACATCCAA | |
| | | | | | | AGGAA | | CAAGAAA | | AUAGGAA | | CAAGAAA | | TAGGAA | |
| NM_ | 4224- | usgsuaa(Chd)AfuCf | 1720 | VPusCfsauuCfcUfAfuu | 2054 | UGUAACAU | 2388 | GCAUUCCU | 2722 | UGUAACA | 3056 | UCAUUCCU | 3390 | CTTGTAAC | 3724 |
| 002973.3 | 4246 | CfAfauaggaausgsa | | ggAfuGfuuacasasg | | CCAAUAGG | | AUUGGAUG | | UCCAAUA | | AUUGGAUG | | ATCCAATA | |
| | | | | | | AAUGC | | UUACAAG | | GGAAUGA | | UUACAAG | | GGAATGC | |
| NM_ | 4226- | usasaca(Uhd)CfcAf | 1721 | VPusAfsgcaUfuCfCfua | 2055 | UAACAUCC | 2389 | UAGCAUUC | 2723 | UAACAUC | 3057 | UAGCAUUC | 3391 | TGTAACAT | 3725 |
| 002973.3 | 4248 | AfUfaggaaugcsusa | | uuGfgAfuguuascsa | | AAUAGGAA | | CUAUUGGA | | CAAUAGG | | CUAUUGGA | | CCAATAGG | |
| | | | | | | UGCUA | | UGUUACA | | AAUGCUA | | UGUUACA | | AATGCTA | |
| NM_ | 4227- | asascau(Chd)CfaAf | 1722 | VPusUfsagcAfuUfCfcu | 2056 | AACAUCCA | 2390 | UUAGCAUU | 2724 | AACAUCC | 3058 | UUAGCAUU | 3392 | GTAACATC | 3726 |
| 002973.3 | 4249 | UfAfggaaugcusasa | | auUfgGfauguusasc | | AUAGGAAU | | CCUAUUGG | | AAUAGGA | | CCUAUUGG | | CAATAGGA | |
| | | | | | | GCUAA | | AUGUUAC | | AUGCUAA | | AUGUUAC | | ATGCTAA | |
| NM_ | 4228- | ascsauc(Chd)AfaUf | 1723 | VPusUfsuagCfaUfUfcc | 2057 | ACAUCCAA | 2391 | GUUAGCAU | 2725 | ACAUCCA | 3059 | UUUAGCAU | 3393 | TAACATCC | 3727 |
| 002973.3 | 4250 | AfGfgaaugcuasasa | | uaUfuGfgaugususa | | UAGGAAUG | | UCCUAUUG | | AUAGGAA | | UCCUAUUG | | AATAGGAA | |
| | | | | | | CUAAC | | GAUGUUA | | UGCUAAA | | GAUGUUA | | TGCTAAC | |
| NM_ | 4229- | csasucc(Ahd)AfuAf | 1724 | VPusGfsuuaGfcAfUfuc | 2058 | CAUCCAAU | 2392 | UGUUAGCA | 2726 | CAUCCAA | 3060 | UGUUAGCA | 3394 | AACATCCA | 3728 |
| 002973.3 | 4251 | GfGfaaugcuaascsa | | cuAfuUfggaugsusu | | AGGAAUGC | | UUCCUAUU | | UAGGAAU | | UUCCUAUU | | ATAGGAAT | |
| | | | | | | UAACA | | GGAUGUU | | GCUAACA | | GGAUGUU | | GCTAACA | |
| NM_ | 4234- | asasuag(Ghd)AfaUf | 1725 | VPusGfsaacUfgUfUfag | 2059 | AAUAGGAA | 2393 | UGAACUGU | 2727 | AAUAGGA | 3061 | UGAACUGU | 3395 | CCAATAGG | 3729 |
| 002973.3 | 4256 | GfCfuaacaguuscsa | | caUfuCfcuauusgsg | | UGCUAACA | | UAGCAUUC | | AUGCUAA | | UAGCAUUC | | AATGCTAA | |
| | | | | | | GUUCA | | CUAUUGG | | CAGUUCA | | CUAUUGG | | CAGTTCA | |
| NM_ | 4235- | asusagg(Ahd)AfuG | 1726 | VPusUfsgaaCfuGfUfua | 2060 | AUAGGAAU | 2394 | GUGAACUG | 2728 | AUAGGAA | 3062 | UUGAACUG | 3396 | CAATAGGA | 3730 |
| 002973.3 | 4257 | fCfUfaacaguucsasa | | gcAfuUfccuaususg | | GCUAACAG | | UUAGCAUU | | UGCUAAC | | UUAGCAUU | | ATGCTAAC | |
| | | | | | | UUCAC | | CCUAUUG | | AGUUCAA | | CCUAUUG | | AGTTCAC | |
| NM_ | 4236- | usasgga(Ahd)UfgC | 1727 | VPusGfsugaAfcUfGfuu | 2061 | UAGGAAUG | 2395 | AGUGAACU | 2729 | UAGGAAU | 3063 | UGUGAACU | 3397 | AATAGGAA | 3731 |
| 002973.3 | 4258 | fUfAfacaguucascsa | | agCfaUfuccuasusu | | CUAACAGU | | GUUAGCAU | | GCUAACA | | GUUAGCAU | | TGCTAACA | |
| | | | | | | UCACU | | UCCUAUU | | GUUCACA | | UCCUAUU | | GTTCACT | |
| NM_ | 4237- | asgsgaa(Uhd)GfcUf | 1728 | VPusAfsgugAfaCfUfgu | 2062 | AGGAAUGC | 2396 | AAGUGAAC | 2730 | AGGAAUG | 3064 | UAGUGAAC | 3398 | ATAGGAAT | 3732 |
| 002973.3 | 4259 | AfAfcaguucacsusa | | uaGfcAfuuccusasu | | UAACAGUU | | UGUUAGCA | | CUAACAG | | UGUUAGCA | | GCTAACAG | |
| | | | | | | CACUU | | UUCCUAU | | UUCACUA | | UUCCUAU | | TTCACTT | |
| NM_ | 4238- | gsgsaau(Ghd)CfuA | 1729 | VPusAfsaguGfaAfCfug | 2063 | GGAAUGCU | 2397 | CAAGUGAA | 2731 | GGAAUGC | 3065 | UAAGUGAA | 3399 | TAGGAATG | 3733 |
| 002973.3 | 4260 | fAfCfaguucacususa | | uuAfgCfauuccsusa | | AACAGUUC | | CUGUUAGC | | UAACAGU | | CUGUUAGC | | CTAACAGT | |
| | | | | | | ACUUG | | AUUCCUA | | UCACUUA | | AUUCCUA | | TCACTTG | |
| NM_ | 4239- | gsasaug(Chd)UfaAf | 1730 | VPusCfsaagUfgAfAfcu | 2064 | GAAUGCUA | 2398 | GCAAGUGA | 2732 | GAAUGCU | 3066 | UCAAGUGA | 3400 | AGGAATGC | 3734 |
| 002973.3 | 4261 | CfAfguucacuusgsa | | guUfaGfcauucscsu | | ACAGUUCA | | ACUGUUAG | | AACAGUU | | ACUGUUAG | | TAACAGTT | |
| | | | | | | CUUGC | | CAUUCCU | | CACUUGA | | CAUUCCU | | CACTTGC | |
| NM_ | 4243- | gscsuaa(Chd)AfgUf | 1731 | VPusAfscugCfaAfGfug | 2065 | GCUAACAG | 2399 | CACUGCAA | 2733 | GCUAACA | 3067 | UACUGCAA | 3401 | ATGCTAAC | 3735 |
| 002973.3 | 4265 | UfCfacuugcagsusa | | aaCfuGfuuagcsasu | | UUCACUUG | | GUGAACUG | | GUUCACU | | GUGAACUG | | AGTTCACT | |
| | | | | | | CAGUG | | UUAGCAU | | UGCAGUA | | UUAGCAU | | TGCAGTG | |
| NM_ | 4248- | csasguu(Chd)AfcUf | 1732 | VPusCfsuucCfaCfUfgc | 2066 | CAGUUCAC | 2400 | UCUUCCAC | 2734 | CAGUUCA | 3068 | UCUUCCAC | 3402 | AACAGTTC | 3736 |
| 002973.3 | 4270 | UfGfcaguggaasgsa | | aaGfuGfaacugsusu | | UUGCAGUG | | UGCAAGUG | | CUUGCAG | | UGCAAGUG | | ACTTGCAG | |
| | | | | | | GAAGA | | AACUGUU | | UGGAAGA | | AACUGUU | | TGGAAGA | |
| NM_ | 4275- | gsasccg(Ahd)GfuA | 1733 | VPusCfsuaaAfuGfCfcu | 2067 | GACCGAGU | 2401 | CCUAAAUG | 2735 | GACCGAG | 3069 | UCUAAAUG | 3403 | TGGACCGA | 3737 |
| 002973.3 | 4297 | fGfAfggcauuuasgsa | | cuAfcUfcggucscsa | | AGAGGCAU | | CCUCUACU | | UAGAGGC | | CCUCUACU | | GTAGAGGC | |
| | | | | | | UUAGG | | CGGUCCA | | AUUUAGA | | CGGUCCA | | ATTTAGG | |
| NM_ | 4276- | ascscga(Ghd)UfaGf | 1734 | VPusCfscuaAfaUfGfcc | 2068 | ACCGAGUA | 2402 | UCCUAAAU | 2736 | ACCGAGU | 3070 | UCCUAAAU | 3404 | GGACCGAG | 3738 |
| 002973.3 | 4298 | AfGfgcauuuagsgsa | | ucUfaCfucgguscsc | | GAGGCAUU | | GCCUCUAC | | AGAGGCA | | GCCUCUAC | | TAGAGGCA | |
| | | | | | | UAGGA | | UCGGUCC | | UUUAGGA | | UCGGUCC | | TTTAGGA | |
| NM_ | 4304- | gsgscua(Uhd)UfcCf | 1735 | VPusUfsaugGfaAfUfua | 2069 | GGCUAUUC | 2403 | AUAUGGAA | 2737 | GGCUAUU | 3071 | UUAUGGAA | 3405 | GGGGCTAT | 3739 |
| 002973.3 | 4326 | AfUfaauuccausasa | | ugGfaAfuagccscsc | | CAUAAUUC | | UUAUGGAA | | CCAUAAU | | UUAUGGAA | | TCCATAAT | |
| | | | | | | CAUAU | | UAGCCCC | | UCCAUAA | | UAGCCCC | | TCCATAT | |
| NM_ | 4361- | usgsccg(Ahd)AfaCf | 1736 | VPusAfsauaAfcUfUfcc | 2070 | UGCCGAAA | 2404 | AAAUAACU | 2738 | UGCCGAA | 3072 | UAAUAACU | 3406 | CTTGCCGA | 3740 |
| 002973.3 | 4383 | UfGfgaaguuaususa | | agUfuUfcggcasasg | | CUGGAAGU | | UCCAGUUU | | ACUGGAA | | UCCAGUUU | | AACTGGAA | |
| | | | | | | UAUUU | | CGGCAAG | | GUUAUUA | | CGGCAAG | | GTTATTT | |
| NM_ | 4363- | cscsgaa(Ahd)CfuGf | 1737 | VPusUfsaaaUfaAfCfuu | 2071 | CCGAAACU | 2405 | AUAAAUAA | 2739 | CCGAAAC | 3073 | UUAAAUAA | 3407 | TGCCGAAA | 3741 |
| 002973.3 | 4385 | GfAfaguuauuusasa | | ccAfgUfuucggscsa | | GGAAGUUA | | CUUCCAGU | | UGGAAGU | | CUUCCAGU | | CTGGAAGT | |
| | | | | | | UUUAU | | UUCGGCA | | UAUUUAA | | UUCGGCA | | TATTTAT | |
| NM_ | 4364- | csgsaaa(Chd)UfgGf | 1738 | VPusAfsuaaAfuAfAfcu | 2072 | CGAAACUG | 2406 | AAUAAAUA | 2740 | CGAAACU | 3074 | UAUAAAUA | 3408 | GCCGAAAC | 3742 |
| 002973.3 | 4386 | AfAfguuauuuasusa | | ucCfaGfuuucgsgsc | | GAAGUUAU | | ACUUCCAG | | GGAAGUU | | ACUUCCAG | | TGGAAGTT | |
| | | | | | | UUAUU | | UUUCGGC | | AUUUAUA | | UUUCGGC | | ATTTATT | |
| NM_ | 4365- | gsasaac(Uhd)GfgAf | 1739 | VPusAfsauaAfaUfAfac | 2073 | GAAACUGG | 2407 | AAAUAAAU | 2741 | GAAACUG | 3075 | UAAUAAAU | 3409 | CCGAAACT | 3743 |
| 002973.3 | 4387 | AfGfuuauuuaususa | | uuCfcAfguuucsgsg | | AAGUUAUU | | AACUUCCA | | GAAGUUA | | AACUUCCA | | GGAAGTTA | |
| | | | | | | UAUUU | | GUUUCGG | | UUUAUUA | | GUUUCGG | | TTTATTT | |
| NM_ | 4366- | asasacu(Ghd)GfaAf | 1740 | VPusAfsaauAfaAfUfaa | 2074 | AAACUGGA | 2408 | AAAAUAAA | 2742 | AAACUGG | 3076 | UAAAUAAA | 3410 | CGAAACTG | 3744 |
| 002973.3 | 4388 | GfUfuauuuauususa | | cuUfcCfaguuuscsg | | AGUUAUUU | | UAACUUCC | | AAGUUAU | | UAACUUCC | | GAAGTTAT | |
| | | | | | | AUUUU | | AGUUUCG | | UUAUUUA | | AGUUUCG | | TTATTTT | |
| NM_ | 4388- | usasaua(Ahd)CfcCf | 1741 | VPusAfsugaCfuUfUfca | 2075 | UAAUAACC | 2409 | CAUGACUU | 2743 | UAAUAAC | 3077 | UAUGACUU | 3411 | TTTAATAA | 3745 |
| 002973.3 | 4410 | UfUfgaaagucasusa | | agGfgUfuauuasasa | | CUUGAAAG | | UCAAGGGU | | CCUUGAA | | UCAAGGGU | | CCCTTGAA | |
| | | | | | | UCAUG | | UAUUAAA | | AGUCAUA | | UAUUAAA | | AGTCATG | |
| NM_ | 4389- | asasuaa(Chd)CfcUf | 1742 | VPusCfsaugAfcUfUfuc | 2076 | AAUAACCC | 2410 | UCAUGACU | 2744 | AAUAACC | 3078 | UCAUGACU | 3412 | TTAATAAC | 3746 |
| 002973.3 | 4411 | UfGfaaagucausgsa | | aaGfgGfuuauusasa | | UUGAAAGU | | UUCAAGGG | | CUUGAAA | | UUCAAGGG | | CCTTGAAA | |
| | | | | | | CAUGA | | UUAUUAA | | GUCAUGA | | UUAUUAA | | GTCATGA | |
| NM_ | 4392- | asasccc(Uhd)UfgAf | 1743 | VPusGfsuucAfuGfAfcu | 2077 | AACCCUUG | 2411 | UGUUCAUG | 2745 | AACCCUU | 3079 | UGUUCAUG | 3413 | ATAACCCT | 3747 |
| 002973.3 | 4414 | AfAfgucaugaascsa | | uuCfaAfggguusasu | | AAAGUCAU | | ACUUUCAA | | GAAAGUC | | ACUUUCAA | | TGAAAGTC | |
| | | | | | | GAACA | | GGGUUAU | | AUGAACA | | GGGUUAU | | ATGAACA | |
| NM_ | 4396- | csusuga(Ahd)AfgU | 1744 | VPusAfsuguGfuUfCfau | 2078 | CUUGAAAG | 2412 | GAUGUGUU | 2746 | CUUGAAA | 3080 | UAUGUGUU | 3414 | CCCTTGAA | 3748 |
| 002973.3 | 4418 | fCfAfugaacacasusa | | gaCfuUfucaagsgsg | | UCAUGAAC | | CAUGACUU | | GUCAUGA | | CAUGACUU | | AGTCATGA | |
| | | | | | | ACAUC | | UCAAGGG | | ACACAUA | | UCAAGGG | | ACACATC | |
| NM_ | 4402- | asgsuca(Uhd)GfaAf | 1745 | VPusUfsagcUfgAfUfgu | 2079 | AGUCAUGA | 2413 | CUAGCUGA | 2747 | AGUCAUG | 3081 | UUAGCUGA | 3415 | AAAGTCAT | 3749 |
| 002973.3 | 4424 | CfAfcaucagcusasa | | guUfcAfugacususu | | ACACAUCA | | UGUGUUCA | | AACACAU | | UGUGUUCA | | GAACACAT | |
| | | | | | | GCUAG | | UGACUUU | | CAGCUAA | | UGACUUU | | CAGCTAG | |
| NM_ | 4403- | gsuscau(Ghd)AfaCf | 1746 | VPusCfsuagCfuGfAfug | 2080 | GUCAUGAA | 2414 | GCUAGCUG | 2748 | GUCAUGA | 3082 | UCUAGCUG | 3416 | AAGTCATG | 3750 |
| 002973.3 | 4425 | AfCfaucagcuasgsa | | ugUfuCfaugacsusu | | CACAUCAG | | AUGUGUUC | | ACACAUC | | AUGUGUUC | | AACACATC | |
| | | | | | | CUAGC | | AUGACUU | | AGCUAGA | | AUGACUU | | AGCTAGC | |
| NM_ | 4404- | uscsaug(Ahd)AfcA | 1747 | VPusGfscuaGfcUfGfau | 2081 | UCAUGAAC | 2415 | UGCUAGCU | 2749 | UCAUGAA | 3083 | UGCUAGCU | 3417 | AGTCATGA | 3751 |
| 002973.3 | 4426 | fCfAfucagcuagscsa | | guGfuUfcaugascsu | | ACAUCAGC | | GAUGUGUU | | CACAUCA | | GAUGUGUU | | ACACATCA | |
| | | | | | | UAGCA | | CAUGACU | | GCUAGCA | | CAUGACU | | GCTAGCA | |
| NM_ | 4405- | csasuga(Ahd)CfaCf | 1748 | VPusUfsgcuAfgCfUfga | 2082 | CAUGAACA | 2416 | UUGCUAGC | 2750 | CAUGAAC | 3084 | UUGCUAGC | 3418 | GTCATGAA | 3752 |
| 002973.3 | 4427 | AfUfcagcuagcsasa | | ugUfgUfucaugsasc | | CAUCAGCU | | UGAUGUGU | | ACAUCAG | | UGAUGUGU | | CACATCAG | |
| | | | | | | AGCAA | | UCAUGAC | | CUAGCAA | | UCAUGAC | | CTAGCAA | |
| NM_ | 4405- | csasuga(Ahd)CfaCf | 1749 | VPusUfsgcuAfgCfUfga | 2083 | CAUGAACA | 2417 | UUGCUAGC | 2751 | CAUGAAC | 3085 | UUGCUAGC | 3419 | GTCATGAA | 3753 |
| 002973.3 | 4427 | AfUfcagcuagcsasa | | ugUfgUfucaugsasc | | CAUCAGCU | | UGAUGUGU | | ACAUCAG | | UGAUGUGU | | CACATCAG | |
| | | | | | | AGCAA | | UCAUGAC | | CUAGCAA | | UCAUGAC | | CTAGCAA | |
| NM_ | 4406- | asusgaa(Chd)AfcAf | 1750 | VPusUfsugcUfaGfCfug | 2084 | AUGAACAC | 2418 | UUUGCUAG | 2752 | AUGAACA | 3086 | UUUGCUAG | 3420 | TCATGAAC | 3754 |
| 002973.3 | 4428 | UfCfagcuagcasasa | | auGfuGfuucausgsa | | AUCAGCUA | | CUGAUGUG | | CAUCAGC | | CUGAUGUG | | ACATCAGC | |
| | | | | | | GCAAA | | UUCAUGA | | UAGCAAA | | UUCAUGA | | TAGCAAA | |
| NM_ | 4407- | usgsaac(Ahd)CfaUf | 1751 | VPusUfsuugCfuAfGfcu | 2085 | UGAACACA | 2419 | UUUUGCUA | 2753 | UGAACAC | 3087 | UUUUGCUA | 3421 | CATGAACA | 3755 |
| 002973.3 | 4429 | CfAfgcuagcaasasa | | gaUfgUfguucasusg | | UCAGCUAG | | GCUGAUGU | | AUCAGCU | | GCUGAUGU | | CATCAGCT | |
| | | | | | | CAAAA | | GUUCAUG | | AGCAAAA | | GUUCAUG | | AGCAAAA | |
| NM_ | 4408- | gsasaca(Chd)AfuCf | 1752 | VPusUfsuuuGfcUfAfgc | 2086 | GAACACAU | 2420 | CUUUUGCU | 2754 | GAACACA | 3088 | UUUUUGCU | 3422 | ATGAACAC | 3756 |
| 002973.3 | 4430 | AfGfcuagcaaasasa | | ugAfuGfuguucsasu | | CAGCUAGC | | AGCUGAUG | | UCAGCUA | | AGCUGAUG | | ATCAGCTA | |
| | | | | | | AAAAG | | UGUUCAU | | GCAAAAA | | UGUUCAU | | GCAAAAG | |
| NM_ | 4409- | asascac(Ahd)UfcAf | 1753 | VPusCfsuuuUfgCfUfag | 2087 | AACACAUC | 2421 | UCUUUUGC | 2755 | AACACAU | 3089 | UCUUUUGC | 3423 | TGAACACA | 3757 |
| 002973.3 | 4431 | GfCfuagcaaaasgsa | | cuGfaUfguguuscsa | | AGCUAGCA | | UAGCUGAU | | CAGCUAG | | UAGCUGAU | | TCAGCTAG | |
| | | | | | | AAAGA | | GUGUUCA | | CAAAAGA | | GUGUUCA | | CAAAAGA | |
| NM_ | 4413- | csasuca(Ghd)CfuAf | 1754 | VPusAfscuuCfuUfUfug | 2088 | CAUCAGCU | 2422 | UACUUCUU | 2756 | CAUCAGC | 3090 | UACUUCUU | 3424 | CACATCAG | 3758 |
| 002973.3 | 4435 | GfCfaaaagaagsusa | | cuAfgCfugaugsusg | | AGCAAAAG | | UUGCUAGC | | UAGCAAA | | UUGCUAGC | | CTAGCAAA | |
| | | | | | | AAGUA | | UGAUGUG | | AGAAGUA | | UGAUGUG | | AGAAGTA | |
| NM_ | 4419- | csusagc(Ahd)AfaAf | 1755 | VPusCfsuugUfuAfCfuu | 2089 | CUAGCAAA | 2423 | UCUUGUUA | 2757 | CUAGCAA | 3091 | UCUUGUUA | 3425 | AGCTAGCA | 3759 |
| 002973.3 | 4441 | GfAfaguaacaasgsa | | cuUfuUfgcuagscsu | | AGAAGUAA | | CUUCUUUU | | AAGAAGU | | CUUCUUUU | | AAAGAAGT | |
| | | | | | | CAAGA | | GCUAGCU | | AACAAGA | | GCUAGCU | | AACAAGA | |
| NM_ | 4431- | gsusaac(Ahd)AfgA | 1756 | VPusGfscaaGfaAfUfca | 2090 | GUAACAAG | 2424 | AGCAAGAA | 2758 | GUAACAA | 3092 | UGCAAGAA | 3426 | AAGTAACA | 3760 |
| 002973.3 | 4453 | fGfUfgauucuugscsa | | cuCfuUfguuacsusu | | AGUGAUUC | | UCACUCUU | | GAGUGAU | | UCACUCUU | | AGAGTGAT | |
| | | | | | | UUGCU | | GUUACUU | | UCUUGCA | | GUUACUU | | TCTTGCT | |
| NM_ | 4432- | usasaca(Ahd)GfaGf | 1757 | VPusAfsgcaAfgAfAfuc | 2091 | UAACAAGA | 2425 | CAGCAAGA | 2759 | UAACAAG | 3093 | UAGCAAGA | 3427 | AGTAACAA | 3761 |
| 002973.3 | 4454 | UfGfauucuugcsusa | | acUfcUfuguuascsu | | GUGAUUCU | | AUCACUCU | | AGUGAUU | | AUCACUCU | | GAGTGATT | |
| | | | | | | UGCUG | | UGUUACU | | CUUGCUA | | UGUUACU | | CTTGCTG | |
| NM_ | 4433- | asascaa(Ghd)AfgUf | 1758 | VPusCfsagcAfaGfAfau | 2092 | AACAAGAG | 2426 | GCAGCAAG | 2760 | AACAAGA | 3094 | UCAGCAAG | 3428 | GTAACAAG | 3762 |
| 002973.3 | 4455 | GfAfuucuugcusgsa | | caCfuCfuuguusasc | | UGAUUCUU | | AAUCACUC | | GUGAUUC | | AAUCACUC | | AGTGATTC | |
| | | | | | | GCUGC | | UUGUUAC | | UUGCUGA | | UUGUUAC | | TTGCTGC | |
| NM_ | 4437- | asgsagu(Ghd)AfuU | 1759 | VPusAfsuagCfaGfCfaa | 2093 | AGAGUGAU | 2427 | AAUAGCAG | 2761 | AGAGUGA | 3095 | UAUAGCAG | 3429 | CAAGAGTG | 3763 |
| 002973.3 | 4459 | fCfUfugcugcuasusa | | gaAfuCfacucususg | | UCUUGCUG | | CAAGAAUC | | UUCUUGC | | CAAGAAUC | | ATTCTTGCT | |
| | | | | | | CUAUU | | ACUCUUG | | UGCUAUA | | ACUCUUG | | GCTATT | |
| NM_ | 4438- | gsasgug(Ahd)UfuC | 1760 | VPusAfsauaGfcAfGfca | 2094 | GAGUGAUU | 2428 | UAAUAGCA | 2762 | GAGUGAU | 3096 | UAAUAGCA | 3430 | AAGAGTGA | 3764 |
| 002973.3 | 4460 | fUfUfgcugcuaususa | | agAfaUfcacucsusu | | CUUGCUGC | | GCAAGAAU | | UCUUGCU | | GCAAGAAU | | TTCTTGCTG | |
| | | | | | | UAUUA | | CACUCUU | | GCUAUUA | | CACUCUU | | CTATTA | |
| NM_ | 4440- | gsusgau(Uhd)CfuU | 1761 | VPusGfsuaaUfaGfCfag | 2095 | GUGAUUCU | 2429 | AGUAAUAG | 2763 | GUGAUUC | 3097 | UGUAAUAG | 3431 | GAGTGATT | 3765 |
| 002973.3 | 4462 | fGfCfugcuauuascsa | | caAfgAfaucacsusc | | UGCUGCUA | | CAGCAAGA | | UUGCUGC | | CAGCAAGA | | CTTGCTGC | |
| | | | | | | UUACU | | AUCACUC | | UAUUACA | | AUCACUC | | TATTACT | |
| NM_ | 4492- | ususgga(Ahd)CfgC | 1762 | VPusUfsuagUfaAfAfag | 2096 | UUGGAACG | 2430 | UUUAGUAA | 2764 | UUGGAAC | 3098 | UUUAGUAA | 3432 | ACTTGGAA | 3766 |
| 002973.3 | 4514 | fCfCfuuuuacuasasa | | ggCfgUfuccaasgsu | | CCCUUUUA | | AAGGGCGU | | GCCCUUU | | AAGGGCGU | | CGCCCTTTT | |
| | | | | | | CUAAA | | UCCAAGU | | UACUAAA | | UCCAAGU | | ACTAAA | |
| NM_ | 4493- | usgsgaa(Chd)GfcCf | 1763 | VPusUfsuuaGfuAfAfaa | 2097 | UGGAACGC | 2431 | GUUUAGUA | 2765 | UGGAACG | 3099 | UUUUAGUA | 3433 | CTTGGAAC | 3767 |
| 002973.3 | 4515 | CfUfuuuacuaasasa | | ggGfcGfuuccasasg | | CCUUUUAC | | AAAGGGCG | | CCCUUUU | | AAAGGGCG | | GCCCTTTT | |
| | | | | | | UAAAC | | UUCCAAG | | ACUAAAA | | UUCCAAG | | ACTAAAC | |
| NM_ | 4495- | gsasacg(Chd)CfcUf | 1764 | VPusAfsguuUfaGfUfaa | 2098 | GAACGCCC | 2432 | AAGUUUAG | 2766 | GAACGCC | 3100 | UAGUUUAG | 3434 | TGGAACGC | 3768 |
| 002973.3 | 4517 | UfUfuacuaaacsusa | | aaGfgGfcguucscsa | | UUUUACUA | | UAAAAGGG | | CUUUUAC | | UAAAAGGG | | CCTTTTACT | |
| | | | | | | AACUU | | CGUUCCA | | UAAACUA | | CGUUCCA | | AAACTT | |
| NM_ | 4496- | asascgc(Chd)CfuUf | 1765 | VPusAfsaguUfuAfGfua | 2099 | AACGCCCU | 2433 | CAAGUUUA | 2767 | AACGCCC | 3101 | UAAGUUUA | 3435 | GGAACGCC | 3769 |
| 002973.3 | 4518 | UfUfacuaaacususa | | aaAfgGfgcguuscsc | | UUUACUAA | | GUAAAAGG | | UUUUACU | | GUAAAAGG | | CTTTTACTA | |
| | | | | | | ACUUG | | GCGUUCC | | AAACUUA | | GCGUUCC | | AACTTG | |
| NM_ | 4497- | ascsgcc(Chd)UfuUf | 1766 | VPusCfsaagUfuUfAfgu | 2100 | ACGCCCUU | 2434 | UCAAGUUU | 2768 | ACGCCCU | 3102 | UCAAGUUU | 3436 | GAACGCCC | 3770 |
| 002973.3 | 4519 | UfAfcuaaacuusgsa | | aaAfaGfggcgususc | | UUACUAAA | | AGUAAAAG | | UUUACUA | | AGUAAAAG | | TTTTACTA | |
| | | | | | | CUUGA | | GGCGUUC | | AACUUGA | | GGCGUUC | | AACTTGA | |
| NM_ | 4498- | csgsccc(Uhd)UfuUf | 1767 | VPusUfscaaGfuUfUfag | 2101 | CGCCCUUU | 2435 | GUCAAGUU | 2769 | CGCCCUU | 3103 | UUCAAGUU | 3437 | AACGCCCT | 3771 |
| 002973.3 | 4520 | AfCfuaaacuugsasa | | uaAfaAfggggsusu | | UACUAAAC | | UAGUAAAA | | UUACUAA | | UAGUAAAA | | TTTACTAA | |
| | | | | | | UUGAC | | GGGCGUU | | ACUUGAA | | GGGCGUU | | ACTTGAC | |
| NM_ | 4522- | gsusuuc(Ahd)GfuA | 1768 | VPusCfsgguAfaGfAfau | 2102 | GUUUCAGU | 2436 | ACGGUAAG | 2770 | GUUUCAG | 3104 | UCGGUAAG | 3438 | AAGTTTCA | 3772 |
| 002973.3 | 4544 | fAfAfuucuuaccsgsa | | uuAfcUfgaaacsusu | | AAAUUCUU | | AAUUUACU | | UAAAUUC | | AAUUUACU | | GTAAATTC | |
| | | | | | | ACCGU | | GAAACUU | | UUACCGA | | GAAACUU | | TTACCGT | |
| NM_ | 4523- | ususuca(Ghd)UfaA | 1769 | VPusAfscggUfaAfGfaa | 2103 | UUUCAGUA | 2437 | GACGGUAA | 2771 | UUUCAGU | 3105 | UACGGUAA | 3439 | AGTTTCAG | 3773 |
| 002973.3 | 4545 | fAfUfucuuaccgsusa | | uuUfaCfugaaascsu | | AAUUCUUA | | GAAUUUAC | | AAAUUCU | | GAAUUUAC | | TAAATTCT | |
| | | | | | | CCGUC | | UGAAACU | | UACCGUA | | UGAAACU | | TACCGTC | |
| NM_ | 4524- | ususcag(Uhd)AfaA | 1770 | VPusGfsacgGfuAfAfga | 2104 | UUCAGUAA | 2438 | UGACGGUA | 2772 | UUCAGUA | 3106 | UGACGGUA | 3440 | GTTTCAGT | 3774 |
| 002973.3 | 4546 | fUfUfcuuaccguscsa | | auUfuAfcugaasasc | | AUUCUUAC | | AGAAUUUA | | AAUUCUU | | AGAAUUUA | | AAATTCTT | |
| | | | | | | CGUCA | | CUGAAAC | | ACCGUCA | | CUGAAAC | | ACCGTCA | |
| NM_ | 4525- | uscsagu(Ahd)AfaU | 1771 | VPusUfsgacGfgUfAfag | 2105 | UCAGUAAA | 2439 | UUGACGGU | 2773 | UCAGUAA | 3107 | UUGACGGU | 3441 | TTTCAGTA | 3775 |
| 002973.3 | 4547 | fUfCfuuaccgucsasa | | aaUfuUfacugasasa | | UUCUUACC | | AAGAAUUU | | AUUCUUA | | AAGAAUUU | | AATTCTTA | |
| | | | | | | GUCAA | | ACUGAAA | | CCGUCAA | | ACUGAAA | | CCGTCAA | |
| NM_ | 4526- | csasgua(Ahd)AfuU | 1772 | VPusUfsugaCfgGfUfaa | 2106 | CAGUAAAU | 2440 | UUUGACGG | 2774 | CAGUAAA | 3108 | UUUGACGG | 3442 | TTCAGTAA | 3776 |
| 002973.3 | 4548 | fCfUfuaccgucasasa | | gaAfuUfuacugsasa | | UCUUACCG | | UAAGAAUU | | UUCUUAC | | UAAGAAUU | | ATTCTTAC | |
| | | | | | | UCAAA | | UACUGAA | | CGUCAAA | | UACUGAA | | CGTCAAA | |
| NM_ | 4527- | asgsuaa(Ahd)UfuCf | 1773 | VPusUfsuugAfcGfGfua | 2107 | AGUAAAUU | 2441 | GUUUGACG | 2775 | AGUAAAU | 3109 | UUUUGACG | 3443 | TCAGTAAA | 3777 |
| 002973.3 | 4549 | UfUfaccgucaasasa | | agAfaUfuuacusgsa | | CUUACCGU | | GUAAGAAU | | UCUUACC | | GUAAGAAU | | TTCTTACC | |
| | | | | | | CAAAC | | UUACUGA | | GUCAAAA | | UUACUGA | | GTCAAAC | |
| NM_ | 4528- | gsusaaa(Uhd)UfcUf | 1774 | VPusGfsuuuGfaCfGfgu | 2108 | GUAAAUUC | 2442 | AGUUUGAC | 2776 | GUAAAUU | 3110 | UGUUUGAC | 3444 | CAGTAAAT | 3778 |
| 002973.3 | 4550 | UfAfccgucaaascsa | | aaGfaAfuuuacsusg | | UUACCGUC | | GGUAAGAA | | CUUACCG | | GGUAAGAA | | TCTTACCG | |
| | | | | | | AAACU | | UUUACUG | | UCAAACA | | UUUACUG | | TCAAACT | |
| NM_ | 4529- | usasaau(Uhd)CfuUf | 1775 | VPusAfsguuUfgAfCfg | 2109 | UAAAUUCU | 2443 | CAGUUUGA | 2777 | UAAAUUC | 3111 | UAGUUUGA | 3445 | AGTAAATT | 3779 |
| 002973.3 | 4551 | AfCfcgucaaacsusa | | guaAfgAfauuuascsu | | UACCGUCA | | CGGUAAGA | | UUACCGU | | CGGUAAGA | | CTTACCGT | |
| | | | | | | AACUG | | AUUUACU | | CAAACUA | | AUUUACU | | CAAACTG | |
| NM_ | 4530- | asasauu(Chd)UfuAf | 1776 | VPusCfsaguUfuGfAfcg | 2110 | AAAUUCUU | 2444 | UCAGUUUG | 2778 | AAAUUCU | 3112 | UCAGUUUG | 3446 | GTAAATTC | 3780 |
| 002973.3 | 4552 | CfCfgucaaacusgsa | | guAfaGfaauuusasc | | ACCGUCAA | | ACGGUAAG | | UACCGUC | | ACGGUAAG | | TTACCGTC | |
| | | | | | | ACUGA | | AAUUUAC | | AAACUGA | | AAUUUAC | | AAACTGA | |
| NM_ | 4531- | asasuuc(Uhd)UfaCf | 1777 | VPusUfscagUfuUfGfac | 2111 | AAUUCUUA | 2445 | GUCAGUUU | 2779 | AAUUCUU | 3113 | UUCAGUUU | 3447 | TAAATTCT | 3781 |
| 002973.3 | 4553 | CfGfucaaacugsasa | | ggUfaAfgaauususa | | CCGUCAAA | | GACGGUAA | | ACCGUCA | | GACGGUAA | | TACCGTCA | |
| | | | | | | CUGAC | | GAAUUUA | | AACUGAA | | GAAUUUA | | AACTGAC | |
| NM_ | 4532- | asusucu(Uhd)AfcCf | 1778 | VPusGfsucaGfuUfUfga | 2112 | AUUCUUAC | 2446 | CGUCAGUU | 2780 | AUUCUUA | 3114 | UGUCAGUU | 3448 | AAATTCTT | 3782 |
| 002973.3 | 4554 | GfUfcaaacugascsa | | cgGfuAfagaaususu | | CGUCAAAC | | UGACGGUA | | CCGUCAA | | UGACGGUA | | ACCGTCAA | |
| | | | | | | UGACG | | AGAAUUU | | ACUGACA | | AGAAUUU | | ACTGACG | |
| NM_ | 4533- | ususcuu(Ahd)CfcG | 1779 | VPusCfsgucAfgUfUfug | 2113 | UUCUUACC | 2447 | CCGUCAGU | 2781 | UUCUUAC | 3115 | UCGUCAGU | 3449 | AATTCTTA | 3783 |
| 002973.3 | 4555 | fUfCfaaacugacsgsa | | acGfgUfaagaasusu | | GUCAAACU | | UUGACGGU | | CGUCAAA | | UUGACGGU | | CCGTCAAA | |
| | | | | | | GACGG | | AAGAAUU | | CUGACGA | | AAGAAUU | | CTGACGG | |
| NM_ | 4534- | uscsuua(Chd)CfgUf | 1780 | VPusCfscguCfaGfUfuu | 2114 | UCUUACCG | 2448 | UCCGUCAG | 2782 | UCUUACC | 3116 | UCCGUCAG | 3450 | ATTCTTAC | 3784 |
| 002973.3 | 4556 | CfAfaacugacgsgsa | | gaCfgGfuaagasasu | | UCAAACUG | | UUUGACGG | | GUCAAAC | | UUUGACGG | | CGTCAAAC | |
| | | | | | | ACGGA | | UAAGAAU | | UGACGGA | | UAAGAAU | | TGACGGA | |
| NM_ | 4535- | csusuac(Chd)GfuCf | 1781 | VPusUfsccgUfcAfGfuu | 2115 | CUUACCGU | 2449 | AUCCGUCA | 2783 | CUUACCG | 3117 | UUCCGUCA | 3451 | TTCTTACC | 3785 |
| 002973.3 | 4557 | AfAfacugacggsasa | | ugAfcGfguaagsasa | | CAAACUGA | | GUUUGACG | | UCAAACU | | GUUUGACG | | GTCAAACT | |
| | | | | | | CGGAU | | GUAAGAA | | GACGGAA | | GUAAGAA | | GACGGAT | |
| NM_ | 4536- | ususacc(Ghd)UfcAf | 1782 | VPusAfsuccGfuCfAfgu | 2116 | UUACCGUC | 2450 | AAUCCGUC | 2784 | UUACCGU | 3118 | UAUCCGUC | 3452 | TCTTACCG | 3786 |
| 002973.3 | 4558 | AfAfcugacggasusa | | uuGfaCfgguaasgsa | | AAACUGAC | | AGUUUGAC | | CAAACUG | | AGUUUGAC | | TCAAACTG | |
| | | | | | | GGAUU | | GGUAAGA | | ACGGAUA | | GGUAAGA | | ACGGATT | |
| NM_ | 4537- | usasccg(Uhd)CfaAf | 1783 | VPusAfsaucCfgUfCfag | 2117 | UACCGUCA | 2451 | UAAUCCGU | 2785 | UACCGUC | 3119 | UAAUCCGU | 3453 | CTTACCGT | 3787 |
| 002973.3 | 4559 | AfCfugacggaususa | | uuUfgAfcgguasasg | | AACUGACG | | CAGUUUGA | | AAACUGA | | CAGUUUGA | | CAAACTGA | |
| | | | | | | GAUUA | | CGGUAAG | | CGGAUUA | | CGGUAAG | | CGGATTA | |
| NM_ | 4537- | usasccg(Uhd)CfaAf | 1784 | VPusAfsaucCfgUfCfag | 2118 | UACCGUCA | 2452 | UAAUCCGU | 2786 | UACCGUC | 3120 | UAAUCCGU | 3454 | CTTACCGT | 3788 |
| 002973.3 | 4559 | AfCfugacggaususa | | uuUfgAfcgguasasg | | AACUGACG | | CAGUUUGA | | AAACUGA | | CAGUUUGA | | CAAACTGA | |
| | | | | | | GAUUA | | CGGUAAG | | CGGAUUA | | CGGUAAG | | CGGATTA | |
| NM_ | 4538- | ascscgu(Chd)AfaAf | 1785 | VPusUfsaauCfcGfUfca | 2119 | ACCGUCAA | 2453 | AUAAUCCG | 2787 | ACCGUCA | 3121 | UUAAUCCG | 3455 | TTACCGTC | 3789 |
| 002973.3 | 4560 | CfUfgacggauusasa | | guUfuGfacggusasa | | ACUGACGG | | UCAGUUUG | | AACUGAC | | UCAGUUUG | | AAACTGAC | |
| | | | | | | AUUAU | | ACGGUAA | | GGAUUAA | | ACGGUAA | | GGATTAT | |
| NM_ | 4545- | asascug(Ahd)CfgGf | 1786 | VPusUfsaaaUfaAfUfaa | 2120 | AACUGACG | 2454 | AUAAAUAA | 2788 | AACUGAC | 3122 | UUAAAUAA | 3456 | CAAACTGA | 3790 |
| 002973.3 | 4567 | AfUfuauuauuusasa | | ucCfgUfcaguususg | | GAUUAUUA | | UAAUCCGU | | GGAUUAU | | UAAUCCGU | | CGGATTAT | |
| | | | | | | UUUAU | | CAGUUUG | | UAUUUAA | | CAGUUUG | | TATTTAT | |
| NM_ | 4572- | asgsuuu(Ghd)AfuG | 1787 | VPusAfsgugAfuCfAfcc | 2121 | AGUUUGAU | 2455 | CAGUGAUC | 2789 | AGUUUGA | 3123 | UAGUGAUC | 3457 | CAAGTTTG | 3791 |
| 002973.3 | 4594 | fAfGfgugaucacsusa | | ucAfuCfaaacususg | | GAGGUGAU | | ACCUCAUC | | UGAGGUG | | ACCUCAUC | | ATGAGGTG | |
| | | | | | | CACUG | | AAACUUG | | AUCACUA | | AAACUUG | | ATCACTG | |
| NM_ | 4589- | ascsugu(Chd)UfaCf | 1788 | VPusGfsuugAfaCfCfac | 2122 | ACUGUCUA | 2456 | AGUUGAAC | 2790 | ACUGUCU | 3124 | UGUUGAAC | 3458 | TCACTGTC | 3792 |
| 002973.3 | 4611 | AfGfugguucaascsa | | ugUfaGfacagusgsa | | CAGUGGUU | | CACUGUAG | | ACAGUGG | | CACUGUAG | | TACAGTGG | |
| | | | | | | CAACU | | ACAGUGA | | UUCAACA | | ACAGUGA | | TTCAACT | |
| NM_ | 4590- | csusguc(Uhd)AfcA | 1789 | VPusAfsguuGfaAfCfca | 2123 | CUGUCUAC | 2457 | AAGUUGAA | 2791 | CUGUCUA | 3125 | UAGUUGAA | 3459 | CACTGTCT | 3793 |
| 002973.3 | 4612 | fGfUfgguucaacsusa | | cuGfuAfgacagsusg | | AGUGGUUC | | CCACUGUA | | CAGUGGU | | CCACUGUA | | ACAGTGGT | |
| | | | | | | AACUU | | GACAGUG | | UCAACUA | | GACAGUG | | TCAACTT | |
| NM_ | 4594- | csusaca(Ghd)UfgGf | 1790 | VPusUfsaaaAfgUfUfga | 2124 | CUACAGUG | 2458 | UUAAAAGU | 2792 | CUACAGU | 3126 | UUAAAAGU | 3460 | GTCTACAG | 3794 |
| 002973.3 | 4616 | UfUfcaacuuuusasa | | acCfaCfuguagsasc | | GUUCAACU | | UGAACCAC | | GGUUCAA | | UGAACCAC | | TGGTTCAA | |
| | | | | | | UUUAA | | UGUAGAC | | CUUUUAA | | UGUAGAC | | CTTTTAA | |
| NM_ | 4595- | usascag(Uhd)GfgU | 1791 | VPusUfsuaaAfaGfUfug | 2125 | UACAGUGG | 2459 | CUUAAAAG | 2793 | UACAGUG | 3127 | UUUAAAAG | 3461 | TCTACAGT | 3795 |
| 002973.3 | 4617 | fUfCfaacuuuuasasa | | aaCfcAfcuguasgsa | | UUCAACUU | | UUGAACCA | | GUUCAAC | | UUGAACCA | | GGTTCAAC | |
| | | | | | | UUAAG | | CUGUAGA | | UUUUAAA | | CUGUAGA | | TTTTAAG | |
| NM_ | 4604- | uscsaac(Uhd)UfuUf | 1792 | VPusUfscccUfuAfAfcu | 2126 | UCAACUUU | 2460 | UUCCCUUA | 2794 | UCAACUU | 3128 | UUCCCUUA | 3462 | GTTCAACT | 3796 |
| 002973.3 | 4626 | AfAfguuaagggsasa | | uaAfaAfguugasasc | | UAAGUUAA | | ACUUAAAA | | UUAAGUU | | ACUUAAAA | | TTTAAGTT | |
| | | | | | | GGGAA | | GUUGAAC | | AAGGGAA | | GUUGAAC | | AAGGGAA | |
| NM_ | 4606- | asascuu(Uhd)UfaAf | 1793 | VPusUfsuucCfcUfUfaa | 2127 | AACUUUUA | 2461 | UUUUCCCU | 2795 | AACUUUU | 3129 | UUUUCCCU | 3463 | TCAACTTTT | 3797 |
| 002973.3 | 4628 | GfUfuaagggaasasa | | cuUfaAfaaguusgsa | | AGUUAAGG | | UAACUUAA | | AAGUUAA | | UAACUUAA | | AAGTTAAG | |
| | | | | | | GAAAA | | AAGUUGA | | GGGAAAA | | AAGUUGA | | GGAAAA | |
| NM_ | 4623- | asasaaa(Chd)UfuUf | 1794 | VPusUfscuaCfaAfAfgu | 2128 | AAAAACUU | 2462 | AUCUACAA | 2796 | AAAAACU | 3130 | UUCUACAA | 3464 | GGAAAAAC | 3798 |
| 002973.3 | 4645 | UfAfcuuuguagsasa | | aaAfaGfuuuuuscsc | | UUACUUUG | | AGUAAAAG | | UUUACUU | | AGUAAAAG | | TTTTACTTT | |
| | | | | | | UAGAU | | UUUUUCC | | UGUAGAA | | UUUUUCC | | GTAGAT | |
| NM_ | 557- | csuscag(Uhd)CfuAf | 1795 | VPusAfsaaaGfaAfAfuc | 2129 | CUCAGUCU | 2463 | CAAAAGAA | 2797 | CUCAGUC | 3131 | UAAAAGAA | 3465 | GCCTCAGT | 3799 |
| 002973.4 | 579 | CfGfauuucuuususa | | guAfgAfcugagsgsc | | ACGAUUUC | | AUCGUAGA | | UACGAUU | | AUCGUAGA | | CTACGATT | |
| | | | | | | UUUUG | | CUGAGGC | | UCUUUUA | | CUGAGGC | | TCTTTTG | |
| NM_ | 558- | uscsagu(Chd)UfaCf | 1796 | VPusCfsaaaAfgAfAfau | 2130 | UCAGUCUA | 2464 | UCAAAAGA | 2798 | UCAGUCU | 3132 | UCAAAAGA | 3466 | CCTCAGTC | 3800 |
| 002973.4 | 580 | GfAfuuucuuuusgsa | | cgUfaGfacugasgsg | | CGAUUUCU | | AAUCGUAG | | ACGAUUU | | AAUCGUAG | | TACGATTT | |
| | | | | | | UUUGA | | ACUGAGG | | CUUUUGA | | ACUGAGG | | CTTTTGA | |
| NM_ | 559- | csasguc(Uhd)AfcGf | 1797 | VPusUfscaaAfaGfAfaa | 2131 | CAGUCUAC | 2465 | AUCAAAAG | 2799 | CAGUCUA | 3133 | UUCAAAAG | 3467 | CTCAGTCT | 3801 |
| 002973.4 | 581 | AfUfuucuuuugsasa | | ucGfuAfgacugsasg | | GAUUUCUU | | AAAUCGUA | | CGAUUUC | | AAAUCGUA | | ACGATTTC | |
| | | | | | | UUGAU | | GACUGAG | | UUUUGAA | | GACUGAG | | TTTTGAT | |
| NM_ | 724- | csasuga(Ghd)AfaAf | 1798 | VPusGfsauuCfuGfUfac | 2132 | CAUGAGAA | 2466 | GGAUUCUG | 2800 | CAUGAGA | 3134 | UGAUUCUG | 3468 | CACATGAG | 3802 |
| 002973.4 | 746 | AfGfuacagaauscsa | | uuUfuCfucaugsusg | | AAGUACAG | | UACUUUUC | | AAAGUAC | | UACUUUUC | | AAAAGTAC | |
| | | | | | | AAUCC | | UCAUGUG | | AGAAUCA | | UCAUGUG | | AGAATCC | |
| NM_ | 724- | csasuga(Ghd)AfaAf | 1799 | VPusGfsauuCfuGfUfac | 2133 | CAUGAGAA | 2467 | GGAUUCUG | 2801 | CAUGAGA | 3135 | UGAUUCUG | 3469 | CACATGAG | 3803 |
| 002973.4 | 746 | AfGfuacagaauscsa | | uuUfuCfucaugsusg | | AAGUACAG | | UACUUUUC | | AAAGUAC | | UACUUUUC | | AAAAGTAC | |
| | | | | | | AAUCC | | UCAUGUG | | AGAAUCA | | UCAUGUG | | AGAATCC | |
| NM_ | 790- | asasaug(Uhd)UfcAf | 1800 | VPusAfscaaCfaAfAfgu | 2134 | AAAUGUUC | 2468 | CACAACAA | 2802 | AAAUGUU | 3136 | UACAACAA | 3470 | TCAAATGT | 3804 |
| 002973.4 | 812 | GfAfcuuuguugsusa | | cuGfaAfcauuusgsa | | AGACUUUG | | AGUCUGAA | | CAGACUU | | AGUCUGAA | | TCAGACTT | |
| | | | | | | UUGUG | | CAUUUGA | | UGUUGUA | | CAUUUGA | | TGTTGTG | |
| NM_ | 867- | usgscua(Uhd)CfaGf | 1801 | VPusUfscacUfuUfAfgc | 2135 | UGCUAUCA | 2469 | UUCACUUU | 2803 | UGCUAUC | 3137 | UUCACUUU | 3471 | TCTGCTAT | 3805 |
| 002973.4 | 889 | UfGfcuaaagugsasa | | acUfgAfuagcasgsa | | GUGCUAAA | | AGCACUGA | | AGUGCUA | | AGCACUGA | | CAGTGCTA | |
| | | | | | | GUGAA | | UAGCAGA | | AAGUGAA | | UAGCAGA | | AAGTGAA | |
| NM_ | 1040- | csgsuau(Ghd)AfuA | 1802 | VPusAfsgauAfaAfCfug | 2136 | CGUAUGAU | 2470 | AAGAUAAA | 2804 | CGUAUGA | 3138 | UAGAUAAA | 3472 | TACGTATG | 3806 |
| 002973.4 | 1062 | fGfCfaguuuaucsusa | | cuAfuCfauacgsusa | | AGCAGUUU | | CUGCUAUC | | UAGCAGU | | CUGCUAUC | | ATAGCAGT | |
| | | | | | | AUCUU | | AUACGUA | | UUAUCUA | | AUACGUA | | TTATCTT | |
| NM_ | 1041- | gsusaug(Ahd)UfaG | 1803 | VPusAfsagaUfaAfAfcu | 2137 | GUAUGAUA | 2471 | GAAGAUAA | 2805 | GUAUGAU | 3139 | UAAGAUAA | 3473 | ACGTATGA | 3807 |
| 002973.4 | 1063 | fCfAfguuuaucususa | | gcUfaUfcauacsgsu | | GCAGUUUA | | ACUGCUAU | | AGCAGUU | | ACUGCUAU | | TAGCAGTT | |
| | | | | | | UCUUC | | CAUACGU | | UAUCUUA | | CAUACGU | | TATCTTC | |
| NM_ | 1084- | gsasuaa(Chd)UfcAf | 1804 | VPusAfsaaaAfuUfCfuu | 2138 | GAUAACUC | 2472 | UAAAAAUU | 2806 | GAUAACU | 3140 | UAAAAAUU | 3474 | GAGATAAC | 3808 |
| 002973.4 | 1106 | GfAfagaauuuususa | | cuGfaGfuuaucsusc | | AGAAGAAU | | CUUCUGAG | | CAGAAGA | | CUUCUGAG | | TCAGAAGA | |
| | | | | | | UUUUA | | UUAUCUC | | AUUUUUA | | UUAUCUC | | ATTTTTA | |
| NM_ | 1380- | asuscca(Chd)UfuCf | 1805 | VPusCfsugaAfgUfGfug | 2139 | AUCCACUU | 2473 | UCUGAAGU | 2807 | AUCCACU | 3141 | UCUGAAGU | 3475 | AGATCCAC | 3809 |
| 002973.4 | 1402 | UfCfacacuucasgsa | | agAfaGfuggauscsu | | CUCACACU | | GUGAGAAG | | UCUCACA | | GUGAGAAG | | TTCTCACA | |
| | | | | | | UCAGA | | UGGAUCU | | CUUCAGA | | UGGAUCU | | CTTCAGA | |
| NM_ | 1387- | uscsuca(Chd)AfcUf | 1806 | VPusUfsugaAfaUfCfug | 2140 | UCUCACAC | 2474 | GUUGAAAU | 2808 | UCUCACA | 3142 | UUUGAAAU | 3476 | CTTCTCAC | 3810 |
| 002973.4 | 1409 | UfCfagauuucasasa | | aaGfuGfugagasasg | | UUCAGAUU | | CUGAAGUG | | CUUCAGA | | CUGAAGUG | | ACTTCAGA | |
| | | | | | | UCAAC | | UGAGAAG | | UUUCAAA | | UGAGAAG | | TTTCAAC | |
| NM_ | 1623- | csuscua(Chd)UfaUf | 1807 | VPusUfsgcgUfuUfAfg | 2141 | CUCUACUA | 2475 | AUGCGUUU | 2809 | CUCUACU | 3143 | UUGCGUUU | 3477 | GTCTCTAC | 3811 |
| 002973.4 | 1645 | GfCfcuaaacgcsasa | | gcaUfaGfuagagsasc | | UGCCUAAA | | AGGCAUAG | | AUGCCUA | | AGGCAUAG | | TATGCCTA | |
| | | | | | | CGCAU | | UAGAGAC | | AACGCAA | | UAGAGAC | | AACGCAT | |
| NM_ | 1624- | uscsuac(Uhd)AfuG | 1808 | VPusAfsugcGfuUfUfag | 2142 | UCUACUAU | 2476 | CAUGCGUU | 2810 | UCUACUA | 3144 | UAUGCGUU | 3478 | TCTCTACT | 3812 |
| 002973.4 | 1646 | fCfCfuaaacgcasusa | | gcAfuAfguagasgsa | | GCCUAAAC | | UAGGCAUA | | UGCCUAA | | UAGGCAUA | | ATGCCTAA | |
| | | | | | | GCAUG | | GUAGAGA | | ACGCAUA | | GUAGAGA | | ACGCATG | |
| NM_ | 1692- | uscsgaa(Ahd)UfcAf | 1809 | VPusCfsagaAfaCfUfcu | 2143 | UCGAAAUC | 2477 | GCAGAAAC | 2811 | UCGAAAU | 3145 | UCAGAAAC | 3479 | CCTCGAAA | 3813 |
| 002973.4 | 1714 | CfAfgaguuucusgsa | | guGfaUfuucgasgsg | | ACAGAGUU | | UCUGUGAU | | CACAGAG | | UCUGUGAU | | TCACAGAG | |
| | | | | | | UCUGC | | UUCGAGG | | UUUCUGA | | UUCGAGG | | TTTCTGC | |
| NM_ | 1693- | csgsaaa(Uhd)CfaCf | 1810 | VPusGfscagAfaAfCfuc | 2144 | CGAAAUCA | 2478 | AGCAGAAA | 2812 | CGAAAUC | 3146 | UGCAGAAA | 3480 | CTCGAAAT | 3814 |
| 002973.4 | 1715 | AfGfaguuucugscsa | | ugUfgAfuuucgsasg | | CAGAGUUU | | CUCUGUGA | | ACAGAGU | | CUCUGUGA | | CACAGAGT | |
| | | | | | | CUGCU | | UUUCGAG | | UUCUGCA | | UUUCGAG | | TTCTGCT | |
| NM_ | 2225- | gsusucu(Ahd)CfuU | 1811 | VPusCfsauaGfaUfUfca | 2145 | GUUCUACU | 2479 | CCAUAGAU | 2813 | GUUCUAC | 3147 | UCAUAGAU | 3481 | AAGTTCTA | 3815 |
| 002973.4 | 2247 | fCfUfgaaucuausgsa | | gaAfgUfagaacsusu | | UCUGAAUC | | UCAGAAGU | | UUCUGAA | | UCAGAAGU | | CTTCTGAA | |
| | | | | | | UAUGG | | AGAACUU | | UCUAUGA | | AGAACUU | | TCTATGG | |
| NM_ | 2226- | ususcua(Chd)UfuCf | 1812 | VPusCfscauAfgAfUfuc | 2146 | UUCUACUU | 2480 | UCCAUAGA | 2814 | UUCUACU | 3148 | UCCAUAGA | 3482 | AGTTCTAC | 3816 |
| 002973.4 | 2248 | UfGfaaucuaugsgsa | | agAfaGfuagaascsu | | CUGAAUCU | | UUCAGAAG | | UCUGAAU | | UUCAGAAG | | TTCTGAAT | |
| | | | | | | AUGGA | | UAGAACU | | CUAUGGA | | UAGAACU | | CTATGGA | |
| NM_ | 2227- | uscsuac(Uhd)UfcUf | 1813 | VPusUfsccaUfaGfAfuu | 2147 | UCUACUUC | 2481 | AUCCAUAG | 2815 | UCUACUU | 3149 | UUCCAUAG | 3483 | GTTCTACTT | 3817 |
| 002973.4 | 2249 | GfAfaucuauggsasa | | caGfaAfguagasasc | | UGAAUCUA | | AUUCAGAA | | CUGAAUC | | AUUCAGAA | | CTGAATCT | |
| | | | | | | UGGAU | | GUAGAAC | | UAUGGAA | | GUAGAAC | | ATGGAT | |
| NM_ | 2228- | csusacu(Uhd)CfuGf | 1814 | VPusAfsuccAfuAfGfau | 2148 | CUACUUCU | 2482 | GAUCCAUA | 2816 | CUACUUC | 3150 | UAUCCAUA | 3484 | TTCTACTTC | 3818 |
| 002973.4 | 2250 | AfAfucuauggasusa | | ucAfgAfaguagsasa | | GAAUCUAU | | GAUUCAGA | | UGAAUCU | | GAUUCAGA | | TGAATCTA | |
| | | | | | | GGAUC | | AGUAGAA | | AUGGAUA | | AGUAGAA | | TGGATC | |
| NM_ | 2235- | usgsaau(Chd)UfaUf | 1815 | VPusGfsuagUfuGfAfuc | 2149 | UGAAUCUA | 2483 | AGUAGUUG | 2817 | UGAAUCU | 3151 | UGUAGUUG | 3485 | TCTGAATC | 3819 |
| 002973.4 | 2257 | GfGfaucaacuascsa | | caUfaGfauucasgsa | | UGGAUCAA | | AUCCAUAG | | AUGGAUC | | AUCCAUAG | | TATGGATC | |
| | | | | | | CUACU | | AUUCAGA | | AACUACA | | AUUCAGA | | AACTACT | |
| NM_ | 2235- | usgsaau(Chd)UfaUf | 1816 | VPusGfsuagUfuGfAfuc | 2150 | UGAAUCUA | 2484 | AGUAGUUG | 2818 | UGAAUCU | 3152 | UGUAGUUG | 3486 | TCTGAATC | 3820 |
| 002973.4 | 2257 | GfGfaucaacuascsa | | caUfaGfauucasgsa | | UGGAUCAA | | AUCCAUAG | | AUGGAUC | | AUCCAUAG | | TATGGATC | |
| | | | | | | CUACU | | AUUCAGA | | AACUACA | | AUUCAGA | | AACTACT | |
| NM_ | 2250- | ascsuac(Uhd)AfaAf | 1817 | VPusCfsucuAfuUfUfuu | 2151 | ACUACUAA | 2485 | UCUCUAUU | 2819 | ACUACUA | 3153 | UCUCUAUU | 3487 | CAACTACT | 3821 |
| 002973.4 | 2272 | CfAfaaaauagasgsa | | guUfuAfguagususg | | ACAAAAAU | | UUUGUUUA | | AACAAAA | | UUUGUUUA | | AAACAAAA | |
| | | | | | | AGAGA | | GUAGUUG | | AUAGAGA | | GUAGUUG | | ATAGAGA | |
| NM_ | 2310- | ascscaa(Ghd)UfgCf | 1818 | VPusAfsagaAfuCfCfuu | 2152 | ACCAAGUG | 2486 | AAAGAAUC | 2820 | ACCAAGU | 3154 | UAAGAAUC | 3488 | GAACCAAG | 3822 |
| 002973.4 | 2332 | UfAfaggauucususa | | agCfaCfuuggususc | | CUAAGGAU | | CUUAGCAC | | GCUAAGG | | CUUAGCAC | | TGCTAAGG | |
| | | | | | | UCUUU | | UUGGUUC | | AUUCUUA | | UUGGUUC | | ATTCTTT | |
| NM_ | 2525- | ususagg(Ahd)AfaU | 1819 | VPusAfsuucAfaUfGfuu | 2153 | UUAGGAAA | 2487 | GAUUCAAU | 2821 | UUAGGAA | 3155 | UAUUCAAU | 3489 | AGTTAGGA | 3823 |
| 002973.4 | 2547 | fCfAfacauugaasusa | | gaUfuUfccuaascsu | | UCAACAUU | | GUUGAUUU | | AUCAACA | | GUUGAUUU | | AATCAACA | |
| | | | | | | GAAUC | | CCUAACU | | UUGAAUA | | CCUAACU | | TTGAATC | |
| NM_ | 2657- | asgscca(Ahd)CfuCf | 1820 | VPusAfsguaUfaAfAfcu | 2154 | AGCCAACU | 2488 | GAGUAUAA | 2822 | AGCCAAC | 3156 | UAGUAUAA | 3490 | ACAGCCAA | 3824 |
| 002973.4 | 2679 | CfAfguuuauacsusa | | ggAfgUfuggcusgsu | | CCAGUUUA | | ACUGGAGU | | UCCAGUU | | ACUGGAGU | | CTCCAGTT | |
| | | | | | | UACUC | | UGGCUGU | | UAUACUA | | UGGCUGU | | TATACTC | |
| NM_ | 3066- | ususcuu(Chd)AfgC | 1821 | VPusCfsguaCfuGfAfgu | 2155 | UUCUUCAG | 2489 | CCGUACUG | 2823 | UUCUUCA | 3157 | UCGUACUG | 3491 | TCTTCTTCA | 3825 |
| 002973.4 | 3088 | fAfAfcucaguacsgsa | | ugCfuGfaagaasgsa | | CAACUCAG | | AGUUGCUG | | GCAACUC | | AGUUGCUG | | GCAACTCA | |
| | | | | | | UACGG | | AAGAAGA | | AGUACGA | | AAGAAGA | | GTACGG | |
| NM_ | 3156- | ususucu(Ahd)CfuU | 1822 | VPusUfsggaAfaUfGfgc | 2156 | UUUCUACU | 2490 | GUGGAAAU | 2824 | UUUCUAC | 3158 | UUGGAAAU | 3492 | TCTTTCTAC | 3826 |
| 002973.4 | 3178 | fUfGfccauuuccsasa | | aaAfgUfagaaasgsa | | UUGCCAUU | | GGCAAAGU | | UUUGCCA | | GGCAAAGU | | TTTGCCATT | |
| | | | | | | UCCAC | | AGAAAGA | | UUUCCAA | | AGAAAGA | | TCCAC | |
| NM_ | 3157- | ususcua(Chd)UfuU | 1823 | VPusGfsuggAfaAfUfg | 2157 | UUCUACUU | 2491 | CGUGGAAA | 2825 | UUCUACU | 3159 | UGUGGAAA | 3493 | CTTTCTACT | 3827 |
| 002973.4 | 3179 | fGfCfcauuuccascsa | | gcaAfaGfuagaasasg | | UGCCAUUU | | UGGCAAAG | | UUGCCAU | | UGGCAAAG | | TTGCCATTT | |
| | | | | | | CCACG | | UAGAAAG | | UUCCACA | | UAGAAAG | | CCACG | |
| NM_ | 3860- | uscsuug(Uhd)AfaC | 1824 | VPusUfsccuAfuUfGfga | 2158 | UCUUGUAA | 2492 | UUCCUAUU | 2826 | UCUUGUA | 3160 | UUCCUAUU | 3494 | TTTCTTGTA | 3828 |
| 002973.4 | 3882 | fAfUfccaauaggsasa | | ugUfuAfcaagasasa | | CAUCCAAU | | GGAUGUUA | | ACAUCCA | | GGAUGUUA | | ACATCCAA | |
| | | | | | | AGGAA | | CAAGAAA | | AUAGGAA | | CAAGAAA | | TAGGAA | |
| NM_ | 4002- | cscsgaa(Ahd)CfuGf | 1825 | VPusUfsaaaUfaAfCfuu | 2159 | CCGAAACU | 2493 | AUAAAUAA | 2827 | CCGAAAC | 3161 | UUAAAUAA | 3495 | TGCCGAAA | 3829 |
| 002973.4 | 4024 | GfAfaguuauuusasa | | ccAfgUfuucggscsa | | GGAAGUUA | | CUUCCAGU | | UGGAAGU | | CUUCCAGU | | CTGGAAGT | |
| | | | | | | UUUAU | | UUCGGCA | | UAUUUAA | | UUCGGCA | | TATTTAT | |
| NM_ | 4002- | cscsgaa(Ahd)CfuGf | 1826 | VPusUfsaaaUfaAfCfuu | 2160 | CCGAAACU | 2494 | AUAAAUAA | 2828 | CCGAAAC | 3162 | UUAAAUAA | 3496 | TGCCGAAA | 3830 |
| 002973.4 | 4024 | GfAfaguuauuusasa | | ccAfgUfuucggscsa | | GGAAGUUA | | CUUCCAGU | | UGGAAGU | | CUUCCAGU | | CTGGAAGT | |
| | | | | | | UUUAU | | UUCGGCA | | UAUUUAA | | UUCGGCA | | TATTTAT | |
| NM_ | 4002- | cscsgaa(Ahd)CfuGf | 1827 | VPusUfsaaaUfaAfCfuu | 2161 | CCGAAACU | 2495 | AUAAAUAA | 2829 | CCGAAAC | 3163 | UUAAAUAA | 3497 | TGCCGAAA | 3831 |
| 002973.4 | 4024 | GfAfaguuauuusasa | | ccAfgUfuucggscsa | | GGAAGUUA | | CUUCCAGU | | UGGAAGU | | CUUCCAGU | | CTGGAAGT | |
| | | | | | | UUUAU | | UUCGGCA | | UAUUUAA | | UUCGGCA | | TATTTAT | |
| NM_ | 4005- | asasacu(Ghd)GfaAf | 1828 | VPusAfsaauAfaAfUfaa | 2162 | AAACUGGA | 2496 | AAAAUAAA | 2830 | AAACUGG | 3164 | UAAAUAAA | 3498 | CGAAACTG | 3832 |
| 002973.4 | 4027 | GfUfuauuuauususa | | cuUfcCfaguuuscsg | | AGUUAUUU | | UAACUUCC | | AAGUUAU | | UAACUUCC | | GAAGTTAT | |
| | | | | | | AUUUU | | AGUUUCG | | UUAUUUA | | AGUUUCG | | TTATTTT | |
| NM_ | 4035- | csusuga(Ahd)AfgU | 1829 | VPusAfsuguGfuUfCfau | 2163 | CUUGAAAG | 2497 | GAUGUGUU | 2831 | CUUGAAA | 3165 | UAUGUGUU | 3499 | CCCTTGAA | 3833 |
| 002973.4 | 4057 | fCfAfugaacacasusa | | gaCfuUfucaagsgsg | | UCAUGAAC | | CAUGACUU | | GUCAUGA | | CAUGACUU | | AGTCATGA | |
| | | | | | | ACAUC | | UCAAGGG | | ACACAUA | | UCAAGGG | | ACACATC | |
| NM_ | 4035- | csusuga(Ahd)AfgU | 1830 | VPusAfsuguGfuUfCfau | 2164 | CUUGAAAG | 2498 | GAUGUGUU | 2832 | CUUGAAA | 3166 | UAUGUGUU | 3500 | CCCTTGAA | 3834 |
| 002973.4 | 4057 | fCfAfugaacacasusa | | gaCfuUfucaagsgsg | | UCAUGAAC | | CAUGACUU | | GUCAUGA | | CAUGACUU | | AGTCATGA | |
| | | | | | | ACAUC | | UCAAGGG | | ACACAUA | | UCAAGGG | | ACACATC | |
| NM_ | 4041- | asgsuca(Uhd)GfaAf | 1831 | VPusUfsagcUfgAfUfgu | 2165 | AGUCAUGA | 2499 | CUAGCUGA | 2833 | AGUCAUG | 3167 | UUAGCUGA | 3501 | AAAGTCAT | 3835 |
| 002973.4 | 4063 | CfAfcaucagcusasa | | guUfcAfugacususu | | ACACAUCA | | UGUGUUCA | | AACACAU | | UGUGUUCA | | GAACACAT | |
| | | | | | | GCUAG | | UGACUUU | | CAGCUAA | | UGACUUU | | CAGCTAG | |
| NM_ | 4041- | asgsuca(Uhd)GfaAf | 1832 | VPusUfsagcUfgAfUfgu | 2166 | AGUCAUGA | 2500 | CUAGCUGA | 2834 | AGUCAUG | 3168 | UUAGCUGA | 3502 | AAAGTCAT | 3836 |
| 002973.4 | 4063 | CfAfcaucagcusasa | | guUfcAfugacususu | | ACACAUCA | | UGUGUUCA | | AACACAU | | UGUGUUCA | | GAACACAT | |
| | | | | | | GCUAG | | UGACUUU | | CAGCUAA | | UGACUUU | | CAGCTAG | |
| NM_ | 4041- | asgsuca(Uhd)GfaAf | 1833 | VPusUfsagcUfgAfUfgu | 2167 | AGUCAUGA | 2501 | CUAGCUGA | 2835 | AGUCAUG | 3169 | UUAGCUGA | 3503 | AAAGTCAT | 3837 |
| 002973.4 | 4063 | CfAfcaucagcusasa | | guUfcAfugacususu | | ACACAUCA | | UGUGUUCA | | AACACAU | | UGUGUUCA | | GAACACAT | |
| | | | | | | GCUAG | | UGACUUU | | CAGCUAA | | UGACUUU | | CAGCTAG | |
| NM_ | 4042- | gsuscau(Ghd)AfaCf | 1834 | VPusCfsuagCfuGfAfug | 2168 | GUCAUGAA | 2502 | GCUAGCUG | 2836 | GUCAUGA | 3170 | UCUAGCUG | 3504 | AAGTCATG | 3838 |
| 002973.4 | 4064 | AfCfaucagcuasgsa | | ugUfuCfaugacsusu | | CACAUCAG | | AUGUGUUC | | ACACAUC | | AUGUGUUC | | AACACATC | |
| | | | | | | CUAGC | | AUGACUU | | AGCUAGA | | AUGACUU | | AGCTAGC | |
| NM_ | 4042- | gsuscau(Ghd)AfaCf | 1835 | VPusCfsuagCfuGfAfug | 2169 | GUCAUGAA | 2503 | GCUAGCUG | 2837 | GUCAUGA | 3171 | UCUAGCUG | 3505 | AAGTCATG | 3839 |
| 002973.4 | 4064 | AfCfaucagcuasgsa | | ugUfuCfaugacsusu | | CACAUCAG | | AUGUGUUC | | ACACAUC | | AUGUGUUC | | AACACATC | |
| | | | | | | CUAGC | | AUGACUU | | AGCUAGA | | AUGACUU | | AGCTAGC | |
| NM_ | 4044- | csasuga(Ahd)CfaCf | 1836 | VPusUfsgcuAfgCfUfga | 2170 | CAUGAACA | 2504 | UUGCUAGC | 2838 | CAUGAAC | 3172 | UUGCUAGC | 3506 | GTCATGAA | 3840 |
| 002973.4 | 4066 | AfUfcagcuagcsasa | | ugUfgUfucaugsasc | | CAUCAGCU | | UGAUGUGU | | ACAUCAG | | UGAUGUGU | | CACATCAG | |
| | | | | | | AGCAA | | UCAUGAC | | CUAGCAA | | UCAUGAC | | CTAGCAA | |
| NM_ | 4076- | asgsagu(Ghd)AfuU | 1837 | VPusAfsuagCfaGfCfaa | 2171 | AGAGUGAU | 2505 | AAUAGCAG | 2839 | AGAGUGA | 3173 | UAUAGCAG | 3507 | CAAGAGTG | 3841 |
| 002973.4 | 4098 | fCfUfugcugcuasusa | | gaAfuCfacucususg | | UCUUGCUG | | CAAGAAUC | | UUCUUGC | | CAAGAAUC | | ATTCTTGCT | |
| | | | | | | CUAUU | | ACUCUUG | | UGCUAUA | | ACUCUUG | | GCTATT | |
| NM_ | 4076- | asgsagu(Ghd)AfuU | 1838 | VPusAfsuagCfaGfCfaa | 2172 | AGAGUGAU | 2506 | AAUAGCAG | 2840 | AGAGUGA | 3174 | UAUAGCAG | 3508 | CAAGAGTG | 3842 |
| 002973.4 | 4098 | fCfUfugcugcuasusa | | gaAfuCfacucususg | | UCUUGCUG | | CAAGAAUC | | UUCUUGC | | CAAGAAUC | | ATTCTTGCT | |
| | | | | | | CUAUU | | ACUCUUG | | UGCUAUA | | ACUCUUG | | GCTATT | |
| NM_ | 4079- | gsusgau(Uhd)CfuU | 1839 | VPusGfsuaaUfaGfCfag | 2173 | GUGAUUCU | 2507 | AGUAAUAG | 2841 | GUGAUUC | 3175 | UGUAAUAG | 3509 | GAGTGATT | 3843 |
| 002973.4 | 4101 | fGfCfugcuauuascsa | | caAfgAfaucacsusc | | UGCUGCUA | | CAGCAAGA | | UUGCUGC | | CAGCAAGA | | CTTGCTGC | |
| | | | | | | UUACU | | AUCACUC | | UAUUACA | | AUCACUC | | TATTACT | |
| NM_ | 4079- | gsusgau(Uhd)CfuU | 1840 | VPusGfsuaaUfaGfCfag | 2174 | GUGAUUCU | 2508 | AGUAAUAG | 2842 | GUGAUUC | 3176 | UGUAAUAG | 3510 | GAGTGATT | 3844 |
| 002973.4 | 4101 | fGfCfugcuauuascsa | | caAfgAfaucacsusc | | UGCUGCUA | | CAGCAAGA | | UUGCUGC | | CAGCAAGA | | CTTGCTGC | |
| | | | | | | UUACU | | AUCACUC | | UAUUACA | | AUCACUC | | TATTACT | |
| NM_ | 4137- | csgsccc(Uhd)UfuUf | 1841 | VPusUfscaaGfuUfUfag | 2175 | CGCCCUUU | 2509 | GUCAAGUU | 2843 | CGCCCUU | 3177 | UUCAAGUU | 3511 | AACGCCCT | 3845 |
| 002973.4 | 4159 | AfCfuaaacuugsasa | | uaAfaAfgggcgsusu | | UACUAAAC | | UAGUAAAA | | UUACUAA | | UAGUAAAA | | TTTACTAA | |
| | | | | | | UUGAC | | GGGCGUU | | ACUUGAA | | GGGCGUU | | ACTTGAC | |
| NM_ | 4137- | csgsccc(Uhd)UfuUf | 1842 | VPusUfscaaGfuUfUfag | 2176 | CGCCCUUU | 2510 | GUCAAGUU | 2844 | CGCCCUU | 3178 | UUCAAGUU | 3512 | AACGCCCT | 3846 |
| 002973.4 | 4159 | AfCfuaaacuugsasa | | uaAfaAfgggcgsusu | | UACUAAAC | | UAGUAAAA | | UUACUAA | | UAGUAAAA | | TTTACTAA | |
| | | | | | | UUGAC | | GGGCGUU | | ACUUGAA | | GGGCGUU | | ACTTGAC | |
| NM_ | 4176- | usasccg(Uhd)CfaAf | 1843 | VPusAfsaucCfgUfCfag | 2177 | UACCGUCA | 2511 | UAAUCCGU | 2845 | UACCGUC | 3179 | UAAUCCGU | 3513 | CTTACCGT | 3847 |
| 002973.4 | 4198 | AfCfugacggaususa | | uuUfgAfcgguasasg | | AACUGACG | | CAGUUUGA | | AAACUGA | | CAGUUUGA | | CAAACTGA | |
| | | | | | | GAUUA | | CGGUAAG | | CGGAUUA | | CGGUAAG | | CGGATTA | |
| NM_ | 4228- | ascsugu(Chd)UfaCf | 1844 | VPusGfsuugAfaCfCfac | 2178 | ACUGUCUA | 2512 | AGUUGAAC | 2846 | ACUGUCU | 3180 | UGUUGAAC | 3514 | TCACTGTC | 3848 |
| 002973.4 | 4250 | AfGfugguucaascsa | | ugUfaGfacagusgsa | | CAGUGGUU | | CACUGUAG | | ACAGUGG | | CACUGUAG | | TACAGTGG | |
| | | | | | | CAACU | | ACAGUGA | | UUCAACA | | ACAGUGA | | TTCAACT | |
| NM_ | 4228- | ascsugu(Chd)UfaCf | 1845 | VPusGfsuugAfaCfCfac | 2179 | ACUGUCUA | 2513 | AGUUGAAC | 2847 | ACUGUCU | 3181 | UGUUGAAC | 3515 | TCACTGTC | 3849 |
| 002973.4 | 4250 | AfGfugguucaascsa | | ugUfaGfacagusgsa | | CAGUGGUU | | CACUGUAG | | ACAGUGG | | CACUGUAG | | TACAGTGG | |
| | | | | | | CAACU | | ACAGUGA | | UUCAACA | | ACAGUGA | | TTCAACT | |
| NM_ | 4237- | asgsugg(Uhd)UfcA | 1846 | VPusAfsacuUfaAfAfag | 2180 | AGUGGUUC | 2514 | UAACUUAA | 2848 | AGUGGUU | 3182 | UAACUUAA | 3516 | ACAGTGGT | 3850 |
| 002973.4 | 4259 | fAfCfuuuuaagususa | | uuGfaAfccacusgsu | | AACUUUUA | | AAGUUGAA | | CAACUUU | | AAGUUGAA | | TCAACTTTT | |
| | | | | | | AGUUA | | CCACUGU | | UAAGUUA | | CCACUGU | | AAGTTA | |
| NM_ | 4238- | gsusggu(Uhd)CfaA | 1847 | VPusUfsaacUfuAfAfaa | 2181 | GUGGUUCA | 2515 | UUAACUUA | 2849 | GUGGUUC | 3183 | UUAACUUA | 3517 | CAGTGGTT | 3851 |
| 002973.4 | 4260 | fCfUfuuuaaguusasa | | guUfgAfaccacsusg | | ACUUUUAA | | AAAGUUGA | | AACUUUU | | AAAGUUGA | | CAACTTTT | |
| | | | | | | GUUAA | | ACCACUG | | AAGUUAA | | ACCACUG | | AAGTTAA | |
| NM_ | 4256- | usasagg(Ghd)AfaA | 1848 | VPusAfsaguAfaAfAfgu | 2182 | UAAGGGAA | 2516 | AAAGUAAA | 2850 | UAAGGGA | 3184 | UAAGUAAA | 3518 | GTTAAGGG | 3852 |
| 002973.4 | 4278 | fAfAfcuuuuacususa | | uuUfuCfccuuasasc | | AAACUUUU | | AGUUUUUC | | AAAACUU | | AGUUUUUC | | AAAAACTT | |
| | | | | | | ACUUU | | CCUUAAC | | UUACUUA | | CCUUAAC | | TTACTTT | |
| NM_ | 692- | cscsuca(Ghd)CfcUf | 1849 | VPusAfsaagAfaAfUfcg | 2183 | CCUCAGCC | 2517 | AAAAGAAA | 2851 | CCUCAGC | 3185 | UAAAGAAA | 3519 | TGCCTCAG | 3853 |
| 009125.2 | 714 | AfCfgauuucuususa | | uaGfgCfugaggscsa | | UACGAUUU | | UCGUAGGC | | CUACGAU | | UCGUAGGC | | CCTACGAT | |
| | | | | | | CUUUU | | UGAGGCA | | UUCUUUA | | UGAGGCA | | TTCTTTT | |
| NM_ | 693- | csuscag(Chd)CfuAf | 1850 | VPusAfsaaaGfaAfAfuc | 2184 | CUCAGCCU | 2518 | CAAAAGAA | 2852 | CUCAGCC | 3186 | UAAAAGAA | 3520 | GCCTCAGC | 3854 |
| 009125.2 | 715 | CfGfauuucuuususa | | guAfgGfcugagsgsc | | ACGAUUUC | | AUCGUAGG | | UACGAUU | | AUCGUAGG | | CTACGATT | |
| | | | | | | UUUUG | | CUGAGGC | | UCUUUUA | | CUGAGGC | | TCTTTTG | |
| NM_ | 694- | uscsagc(Chd)UfaCf | 1851 | VPusCfsaaaAfgAfAfau | 2185 | UCAGCCUA | 2519 | UCAAAAGA | 2853 | UCAGCCU | 3187 | UCAAAAGA | 3521 | CCTCAGCC | 3855 |
| 009125.2 | 716 | GfAfuuucuuuusgsa | | cgUfaGfgcugasgsg | | CGAUUUCU | | AAUCGUAG | | ACGAUUU | | AAUCGUAG | | TACGATTT | |
| | | | | | | UUUGA | | GCUGAGG | | CUUUUGA | | GCUGAGG | | CTTTTGA | |
| NM_ | 733- | gsasgga(Uhd)GfgU | 1852 | VPusUfsaagUfaUfAfug | 2186 | GAGGAUGG | 2520 | GUAAGUAU | 2854 | GAGGAUG | 3188 | UUAAGUAU | 3522 | GTGAGGAT | 3856 |
| 009125.2 | 755 | fUfCfauauacuusasa | | aaCfcAfuccucsasc | | UUCAUAUA | | AUGAACCA | | GUUCAUA | | AUGAACCA | | GGTTCATA | |
| | | | | | | CUUAC | | UCCUCAC | | UACUUAA | | UCCUCAC | | TACTTAC | |
| NM_ | 733- | gsasgga(Uhd)GfgU | 1853 | VPusUfsaagUfaUfAfug | 2187 | GAGGAUGG | 2521 | AUAAGUAU | 2855 | GAGGAUG | 3189 | UUAAGUAU | 3523 | ATGAGGAT | 3857 |
| 009125.2 | 755 | fUfCfauauacuusasa | | aaCfcAfuccucsasc | | UUCAUAUA | | AUGAACCA | | GUUCAUA | | AUGAACCA | | GGTTCATA | |
| | | | | | | CUUAU | | UCCUCAC | | UACUUAA | | UCCUCAC | | TACTTAC | |
| NM_ | 734- | asgsgau(Ghd)GfuU | 1854 | VPusGfsuaaGfuAfUfau | 2188 | AGGAUGGU | 2522 | CGUAAGUA | 2856 | AGGAUGG | 3190 | UGUAAGUA | 3524 | TGAGGATG | 3858 |
| 009125.2 | 756 | fCfAfuauacuuascsa | | gaAfcCfauccuscsa | | UCAUAUAC | | UAUGAACC | | UUCAUAU | | UAUGAACC | | GTTCATAT | |
| | | | | | | UUACG | | AUCCUCA | | ACUUACA | | AUCCUCA | | ACTTACG | |
| NM_ | 771- | asasugu(Ghd)AfaG | 1855 | VPusUfsuucAfcUfUfgu | 2189 | AAUGUGAA | 2523 | UUUUCACU | 2857 | AAUGUGA | 3191 | UUUUCACU | 3525 | GAAATGTG | 3859 |
| 009125.2 | 793 | fUfAfcaagugaasasa | | acUfuCfacauususc | | GUACAAGU | | UGUACUUC | | AGUACAA | | UGUACUUC | | AAGTACAA | |
| | | | | | | GAAAA | | ACAUUUC | | GUGAAAA | | ACAUUUC | | GTGAAAA | |
| NM_ | 771- | asasugu(Ghd)AfaG | 1856 | VPusUfsuucAfcUfUfgu | 2190 | AAUGUGAA | 2524 | UUUUCACU | 2858 | AAUGUGA | 3192 | UUUUCACU | 3526 | CAAATGTG | 3860 |
| 009125.2 | 793 | fUfAfcaagugaasasa | | acUfuCfacauususc | | GUACAAGU | | UGUACUUC | | AGUACAA | | UGUACUUC | | AAGTACAA | |
| | | | | | | GAAAA | | ACAUUUC | | GUGAAAA | | ACAUUUC | | GTGAAAA | |
| NM_ | 774- | gsusgaa(Ghd)UfaCf | 1857 | VPusGfsuuuUfuCfAfcu | 2191 | GUGAAGUA | 2525 | CGUUUUUC | 2859 | GUGAAGU | 3193 | UGUUUUUC | 3527 | ATGTGAAG | 3861 |
| 009125.2 | 796 | AfAfgugaaaaascsa | | ugUfaCfuucacsasu | | CAAGUGAA | | ACUUGUAC | | ACAAGUG | | ACUUGUAC | | TACAAGTG | |
| | | | | | | AAACG | | UUCACAU | | AAAAACA | | UUCACAU | | AAAAACG | |
| NM_ | 807- | asasgga(Ghd)UfuU | 1858 | VPusGfsuauGfuUfUfua | 2192 | AAGGAGUU | 2526 | UGUAUGUU | 2860 | AAGGAGU | 3194 | UGUAUGUU | 3528 | TGAAGGAG | 3862 |
| 009125.2 | 829 | fUfUfaaaacauascsa | | aaAfaCfuccuuscsa | | UUUAAAAC | | UUAAAAAC | | UUUUAAA | | UUAAAAAC | | TTTTTAAA | |
| | | | | | | AUACA | | UCCUUCA | | ACAUACA | | UCCUUCA | | ACATACA | |
| NM_ | 808- | asgsgag(Uhd)UfuU | 1859 | VPusUfsguaUfgUfUfu | 2193 | AGGAGUUU | 2527 | CUGUAUGU | 2861 | AGGAGUU | 3195 | UUGUAUGU | 3529 | GAAGGAGT | 3863 |
| 009125.2 | 830 | fUfAfaaacauacsasa | | uaaAfaAfcuccususc | | UUAAAACA | | UUUAAAAA | | UUUAAAA | | UUUAAAAA | | TTTTAAAA | |
| | | | | | | UACAG | | CUCCUUC | | CAUACAA | | CUCCUUC | | CATACAG | |
| NM_ | 819- | asasaca(Uhd)AfcAf | 1860 | VPusAfscacUfuAfGfga | 2194 | AAACAUAC | 2528 | CACACUUA | 2862 | AAACAUA | 3196 | UACACUUA | 3530 | TAAAACAT | 3864 |
| 009125.2 | 841 | GfUfccuaagugsusa | | cuGfuAfuguuususa | | AGUCCUAA | | GGACUGUA | | CAGUCCU | | GGACUGUA | | ACAGTCCT | |
| | | | | | | GUGUG | | UGUUUUA | | AAGUGUA | | UGUUUUA | | AAGTGTG | |
| NM_ | 820- | asascau(Ahd)CfaGf | 1861 | VPusCfsacaCfuUfAfgg | 2195 | AACAUACA | 2529 | UCACACUU | 2863 | AACAUAC | 3197 | UCACACUU | 3531 | AAAACATA | 3865 |
| 009125.2 | 842 | UfCfcuaagugusgsa | | acUfgUfauguususu | | GUCCUAAG | | AGGACUGU | | AGUCCUA | | AGGACUGU | | CAGTCCTA | |
| | | | | | | UGUGA | | AUGUUUU | | AGUGUGA | | AUGUUUU | | AGTGTGA | |
| NM_ | 821- | ascsaua(Chd)AfgUf | 1862 | VPusUfscacAfcUfUfag | 2196 | ACAUACAG | 2530 | GUCACACU | 2864 | ACAUACA | 3198 | UUCACACU | 3532 | AAACATAC | 3866 |
| 009125.2 | 843 | CfCfuaagugugsasa | | gaCfuGfuaugususu | | UCCUAAGU | | UAGGACUG | | GUCCUAA | | UAGGACUG | | AGTCCTAA | |
| | | | | | | GUGAC | | UAUGUUU | | GUGUGAA | | UAUGUUU | | GTGTGAC | |
| NM_ | 854- | gscsugc(Ahd)CfaUf | 1863 | VPusGfsuacUfuUfUfcu | 2197 | GCUGCACA | 2531 | UGUACUUU | 2865 | GCUGCAC | 3199 | UGUACUUU | 3533 | ATGCTGCA | 3867 |
| 009125.2 | 876 | GfAfgaaaaguascsa | | caUfgUfgcagcsasu | | UGAGAAAA | | UCUCAUGU | | AUGAGAA | | UCUCAUGU | | CATGAGAA | |
| | | | | | | GUACA | | GCAGCAU | | AAGUACA | | GCAGCAU | | AAGTACA | |
| NM_ | 855- | csusgca(Chd)AfuGf | 1864 | VPusUfsguaCfuUfUfuc | 2198 | CUGCACAU | 2532 | CUGUACUU | 2866 | CUGCACA | 3200 | UUGUACUU | 3534 | TGCTGCAC | 3868 |
| 009125.2 | 877 | AfGfaaaaguacsasa | | ucAfuGfugcagscsa | | GAGAAAAG | | UUCUCAUG | | UGAGAAA | | UUCUCAUG | | ATGAGAAA | |
| | | | | | | UACAG | | UGCAGCA | | AGUACAA | | UGCAGCA | | AGTACAG | |
| NM_ | 908- | asusgga(Ghd)AfgU | 1865 | VPusUfsugaAfcAfAfaa | 2199 | AUGGAGAG | 2533 | UUUGAACA | 2867 | AUGGAGA | 3201 | UUUGAACA | 3535 | TAATGGAG | 3869 |
| 009125.2 | 930 | fGfUfuuuguucasasa | | caCfuCfuccaususa | | UGUUUUGU | | AAACACUC | | GUGUUUU | | AAACACUC | | AGTGTTTT | |
| | | | | | | UCAAA | | UCCAUUA | | GUUCAAA | | UCCAUUA | | GTTCAAA | |
| NM_ | 910- | gsgsaga(Ghd)UfgU | 1866 | VPusAfsuuuGfaAfCfaa | 2200 | GGAGAGUG | 2534 | CAUUUGAA | 2868 | GGAGAGU | 3202 | UAUUUGAA | 3536 | ATGGAGAG | 3870 |
| 009125.2 | 932 | fUfUfuguucaaasusa | | aaCfaCfucuccsasu | | UUUUGUUC | | CAAAACAC | | GUUUUGU | | CAAAACAC | | TGTTTTGTT | |
| | | | | | | AAAUG | | UCUCCAU | | UCAAAUA | | UCUCCAU | | CAAATG | |
| NM_ | 919- | ususugu(Uhd)CfaA | 1867 | VPusAfsgucUfgAfGfca | 2201 | UUUGUUCA | 2535 | AAGUCUGA | 2869 | UUUGUUC | 3203 | UAGUCUGA | 3537 | GTTTTGTTC | 3871 |
| 009125.2 | 941 | fAfUfgcucagacsusa | | uuUfgAfacaaasasc | | AAUGCUCA | | GCAUUUGA | | AAAUGCU | | GCAUUUGA | | AAATGCTC | |
| | | | | | | GACUU | | ACAAAAC | | CAGACUA | | ACAAAAC | | AGACTT | |
| NM_ | 921- | usgsuuc(Ahd)AfaU | 1868 | VPusGfsaagUfcUfGfag | 2202 | UGUUCAAA | 2536 | CGAAGUCU | 2870 | UGUUCAA | 3204 | UGAAGUCU | 3538 | TTTGTTCA | 3872 |
| 009125.2 | 943 | fGfCfucagacuuscsa | | caUfuUfgaacasasa | | UGCUCAGA | | GAGCAUUU | | AUGCUCA | | GAGCAUUU | | AATGCTCA | |
| | | | | | | CUUCG | | GAACAAA | | GACUUCA | | GAACAAA | | GACTTCG | |
| NM_ | 922- | gsusuca(Ahd)AfuG | 1869 | VPusCfsgaaGfuCfUfga | 2203 | GUUCAAAU | 2537 | ACGAAGUC | 2871 | GUUCAAA | 3205 | UCGAAGUC | 3539 | TTGTTCAA | 3873 |
| 009125.2 | 944 | fCfUfcagacuucsgsa | | gcAfuUfugaacsasa | | GCUCAGAC | | UGAGCAUU | | UGCUCAG | | UGAGCAUU | | ATGCTCAG | |
| | | | | | | UUCGU | | UGAACAA | | ACUUCGA | | UGAACAA | | ACTTCGT | |
| NM_ | 923- | ususcaa(Ahd)UfgCf | 1870 | VPusAfscgaAfgUfCfug | 2204 | UUCAAAUG | 2538 | AACGAAGU | 2872 | UUCAAAU | 3206 | UACGAAGU | 3540 | TGTTCAAA | 3874 |
| 009125.2 | 945 | UfCfagacuucgsusa | | agCfaUfuugaascsa | | CUCAGACU | | CUGAGCAU | | GCUCAGA | | CUGAGCAU | | TGCTCAGA | |
| | | | | | | UCGUU | | UUGAACA | | CUUCGUA | | UUGAACA | | CTTCGTT | |
| NM_ | 924- | uscsaaa(Uhd)GfcUf | 1871 | VPusAfsacgAfaGfUfcu | 2205 | UCAAAUGC | 2539 | CAACGAAG | 2873 | UCAAAUG | 3207 | UAACGAAG | 3541 | GTTCAAAT | 3875 |
| 009125.2 | 946 | CfAfgacuucgususa | | gaGfcAfuuugasasc | | UCAGACUU | | UCUGAGCA | | CUCAGAC | | UCUGAGCA | | GCTCAGAC | |
| | | | | | | CGUUG | | UUUGAAC | | UUCGUUA | | UUUGAAC | | TTCGTTG | |
| NM_ | 925- | csasaau(Ghd)CfuCf | 1872 | VPusCfsaacGfaAfGfuc | 2206 | CAAAUGCU | 2540 | ACAACGAA | 2874 | CAAAUGC | 3208 | UCAACGAA | 3542 | TTCAAATG | 3876 |
| 009125.2 | 947 | AfGfacuucguusgsa | | ugAfgCfauuugsasa | | CAGACUUC | | GUCUGAGC | | UCAGACU | | GUCUGAGC | | CTCAGACT | |
| | | | | | | GUUGU | | AUUUGAA | | UCGUUGA | | AUUUGAA | | TCGTTGT | |
| NM_ | 926- | asasaug(Chd)UfcAf | 1873 | VPusAfscaaCfgAfAfgu | 2207 | AAAUGCUC | 2541 | CACAACGA | 2875 | AAAUGCU | 3209 | UACAACGA | 3543 | TCAAATGC | 3877 |
| 009125.2 | 948 | GfAfcuucguugsusa | | cuGfaGfcauuusgsa | | AGACUUCG | | AGUCUGAG | | CAGACUU | | AGUCUGAG | | TCAGACTT | |
| | | | | | | UUGUG | | CAUUUGA | | CGUUGUA | | CAUUUGA | | CGTTGTG | |
| NM_ | 927- | asasugc(Uhd)CfaGf | 1874 | VPusCfsacaAfcGfAfag | 2208 | AAUGCUCA | 2542 | CCACAACG | 2876 | AAUGCUC | 3210 | UCACAACG | 3544 | CAAATGCT | 3878 |
| 009125.2 | 949 | AfCfuucguugusgsa | | ucUfgAfgcauususg | | GACUUCGU | | AAGUCUGA | | AGACUUC | | AAGUCUGA | | CAGACTTC | |
| | | | | | | UGUGG | | GCAUUUG | | GUUGUGA | | GCAUUUG | | GTTGTGG | |
| NM_ | 1131- | ascsaug(Uhd)UfuCf | 1875 | VPusUfsucaUfuAfUfau | 2209 | ACAUGUUU | 2543 | CUUCAUUA | 2877 | ACAUGUU | 3211 | UUUCAUUA | 3545 | TGACATGT | 3879 |
| 009125.2 | 1153 | GfAfuauaaugasasa | | cgAfaAfcauguscsa | | CGAUAUAA | | UAUCGAAA | | UCGAUAU | | UAUCGAAA | | TTCGATAT | |
| | | | | | | UGAAG | | CAUGUCA | | AAUGAAA | | CAUGUCA | | AATGAAG | |
| NM_ | 1186- | ususuau(Chd)UfuC | 1876 | VPusGfsaacCfgUfAfua | 2210 | UUUAUCUU | 2544 | GGAACCGU | 2878 | UUUAUCU | 3212 | UGAACCGU | 3546 | AGTTTATC | 3880 |
| 009125.2 | 1208 | fAfUfauacgguuscsa | | ugAfaGfauaaascsu | | CAUAUACG | | AUAUGAAG | | UCAUAUA | | AUAUGAAG | | TTCATATA | |
| | | | | | | GUUCC | | AUAAACU | | CGGUUCA | | AUAAACU | | CGGTTCC | |
| NM_ | 1214- | asgsgga(Chd)AfaCf | 1877 | VPusAfsauuCfuUfCfug | 2211 | AGGGACAA | 2545 | AAAUUCUU | 2879 | AGGGACA | 3213 | UAAUUCUU | 3547 | AAAGGGAC | 3881 |
| 009125.2 | 1236 | UfCfagaagaaususa | | agUfuGfucccususu | | CUCAGAAG | | CUGAGUUG | | ACUCAGA | | CUGAGUUG | | AACTCAGA | |
| | | | | | | AAUUU | | UCCCUUU | | AGAAUUA | | UCCCUUU | | AGAATTT | |
| NM_ | 1215- | gsgsgac(Ahd)AfcU | 1878 | VPusAfsaauUfcUfUfcu | 2212 | GGGACAAC | 2546 | GAAAUUCU | 2880 | GGGACAA | 3214 | UAAAUUCU | 3548 | AAGGGACA | 3882 |
| 009125.2 | 1237 | fCfAfgaagaauususa | | gaGfuUfgucccsusu | | UCAGAAGA | | UCUGAGUU | | CUCAGAA | | UCUGAGUU | | ACTCAGAA | |
| | | | | | | AUUUC | | GUCCCUU | | GAAUUUA | | GUCCCUU | | GAATTTC | |
| NM_ | 1216- | gsgsaca(Ahd)CfuCf | 1879 | VPusGfsaaaUfuCfUfuc | 2213 | GGACAACU | 2547 | AGAAAUUC | 2881 | GGACAAC | 3215 | UGAAAUUC | 3549 | AGGGACAA | 3883 |
| 009125.2 | 1238 | AfGfaagaauuuscsa | | ugAfgUfuguccscsu | | CAGAAGAA | | UUCUGAGU | | UCAGAAG | | UUCUGAGU | | CTCAGAAG | |
| | | | | | | UUUCU | | UGUCCCU | | AAUUUCA | | UGUCCCU | | AATTTCT | |
| NM_ | 1217- | gsascaa(Chd)UfcAf | 1880 | VPusAfsgaaAfuUfCfuu | 2214 | GACAACUC | 2548 | AAGAAAUU | 2882 | GACAACU | 3216 | UAGAAAUU | 3550 | GGGACAAC | 3884 |
| 009125.2 | 1239 | GfAfagaauuucsusa | | cuGfaGfuuguescsc | | AGAAGAAU | | CUUCUGAG | | CAGAAGA | | CUUCUGAG | | TCAGAAGA | |
| | | | | | | UUCUU | | UUGUCCC | | AUUUCUA | | UUGUCCC | | ATTTCTT | |
| NM_ | 1516- | usgscuu(Chd)UfcA | 1881 | VPusAfsaucUfgAfAfgu | 2215 | UGCUUCUC | 2549 | AAAUCUGA | 2883 | UGCUUCU | 3217 | UAAUCUGA | 3551 | GCTGCTTC | 3885 |
| 009125.2 | 1538 | fCfAfcuucagaususa | | guGfaGfaagcasgsc | | ACACUUCA | | AGUGUGAG | | CACACUU | | AGUGUGAG | | TCACACTT | |
| | | | | | | GAUUU | | AAGCAGC | | CAGAUUA | | AAGCAGC | | CAGATTT | |
| NM_ | 1517- | gscsuuc(Uhd)CfaCf | 1882 | VPusAfsaauCfuGfAfag | 2216 | GCUUCUCA | 2550 | GAAAUCUG | 2884 | GCUUCUC | 3218 | UAAAUCUG | 3552 | CTGCTTCTC | 3886 |
| 009125.2 | 1539 | AfCfuucagauususa | | ugUfgAfgaagcsasg | | CACUUCAG | | AAGUGUGA | | ACACUUC | | AAGUGUGA | | ACACTTCA | |
| | | | | | | AUUUC | | GAAGCAG | | AGAUUUA | | GAAGCAG | | GATTTC | |
| NM_ | 1518- | csusucu(Chd)AfcAf | 1883 | VPusGfsaaaUfcUfGfaa | 2217 | CUUCUCAC | 2551 | UGAAAUCU | 2885 | CUUCUCA | 3219 | UGAAAUCU | 3553 | TGCTTCTC | 3887 |
| 009125.2 | 1540 | CfUfucagauuuscsa | | guGfuGfagaagscsa | | ACUUCAGA | | GAAGUGUG | | CACUUCA | | GAAGUGUG | | ACACTTCA | |
| | | | | | | UUUCA | | AGAAGCA | | GAUUUCA | | AGAAGCA | | GATTTCA | |
| NM_ | 1518- | csusucu(Chd)AfcAf | 1884 | VPusGfsaaaUfcUfGfaa | 2218 | CUUCUCAC | 2552 | UGAAAUCU | 2886 | CUUCUCA | 3220 | UGAAAUCU | 3554 | CACTTCTC | 3888 |
| 009125.2 | 1540 | CfUfucagauuuscsa | | guGfuGfagaagscsa | | ACUUCAGA | | GAAGUGUG | | CACUUCA | | GAAGUGUG | | ACACTTCA | |
| | | | | | | UUUCA | | AGAAGCA | | GAUUUCA | | AGAAGCA | | GATTTCA | |
| NM_ | 1519- | ususcuc(Ahd)CfaCf | 1885 | VPusUfsgaaAfuCfUfga | 2219 | UUCUCACA | 2553 | UUGAAAUC | 2887 | UUCUCAC | 3221 | UUGAAAUC | 3555 | GCTTCTCA | 3889 |
| 009125.2 | 1541 | UfUfcagauuucsasa | | agUfgUfgagaasgsc | | CUUCAGAU | | UGAAGUGU | | ACUUCAG | | UGAAGUGU | | CACTTCAG | |
| | | | | | | UUCAA | | GAGAAGC | | AUUUCAA | | GAGAAGC | | ATTTCAA | |
| NM_ | 1519- | ususcuc(Ahd)CfaCf | 1886 | VPusUfsgaaAfuCfUfga | 2220 | UUCUCACA | 2554 | UUGAAATC | 2888 | UUCUCAC | 3222 | UUGAAAUC | 3556 | ACTTCTCA | 3890 |
| 009125.2 | 1541 | UfUfcagauuucsasa | | agUfgUfgagaasgsc | | CUUCAGAU | | UGAAGUGU | | ACUUCAG | | UGAAGUGU | | CACTTCAG | |
| | | | | | | UUCAA | | GAGAAGC | | AUUUCAA | | GAGAAGC | | ATTTCAA | |
| NM_ | 1553- | uscsaga(Chd)CfaAf | 1887 | VPusUfsuaaCfuAfCfuc | 2221 | UCAGACCA | 2555 | AUUAACUA | 2889 | UCAGACC | 3223 | UUUAACUA | 3557 | GCTCAGAC | 3891 |
| 009125.2 | 1575 | AfGfaguaguuasasa | | uuUfgGfucugasgsc | | AAGAGUAG | | CUCUUUGG | | AAAGAGU | | CUCUUUGG | | CAAAGAGT | |
| | | | | | | UUAAU | | UCUGAGC | | AGUUAAA | | UCUGAGC | | AGTTAAT | |
| NM_ | 1553- | uscsaga(Chd)CfaAf | 1888 | VPusUfsuaaCfuAfCfuc | 2222 | UCAGACCA | 2556 | AUUAACTA | 2890 | UCAGACC | 3224 | UUUAACUA | 3558 | GTTCAGAC | 3892 |
| 009125.2 | 1575 | AfGfaguaguuasasa | | uuUfgGfucugasgsc | | AAGAGUAG | | CUCUUUGG | | AAAGAGU | | CUCUUUGG | | CAAAGAGT | |
| | | | | | | UUAAU | | UCUGAGC | | AGUUAAA | | UCUGAGC | | AGTTAAT | |
| NM_ | 1554- | csasgac(Chd)AfaAf | 1889 | VPusAfsuuaAfcUfAfcu | 2223 | CAGACCAA | 2557 | CAUUAACU | 2891 | CAGACCA | 3225 | UAUUAACU | 3559 | CTCAGACC | 3893 |
| 009125.2 | 1576 | GfAfguaguuaasusa | | cuUfuGfgucugsasg | | AGAGUAGU | | ACUCUUUG | | AAGAGUA | | ACUCUUUG | | AAAGAGTA | |
| | | | | | | UAAUG | | GUCUGAG | | GUUAAUA | | GUCUGAG | | GTTAATG | |
| NM_ | 1554- | csasgac(Chd)AfaAf | 1890 | VPusAfsuuaAfcUfAfcu | 2224 | CAGACCAA | 2558 | AAUUAACU | 2892 | CAGACCA | 3226 | UAUUAACU | 3560 | TTCAGACC | 3894 |
| 009125.2 | 1576 | GfAfguaguuaasusa | | cuUfuGfgucugsasg | | AGAGUAGU | | ACUCUUUG | | AAGAGUA | | ACUCUUUG | | AAAGAGTA | |
| | | | | | | UAAUU | | GUCUGAG | | GUUAAUA | | GUCUGAG | | GTTAATG | |
| NM_ | 1872- | usasgaa(Uhd)UfuG | 1891 | VPusAfsuugUfgGfGfa | 2225 | UAGAAUUU | 2559 | GAUUGUGG | 2893 | UAGAAUU | 3227 | UAUUGUGG | 3561 | CCTAGAAT | 3895 |
| 009125.2 | 1894 | fUfAfucccacaasusa | | uacAfaAfuucuasgsg | | GUAUCCCA | | GAUACAAA | | UGUAUCC | | GAUACAAA | | TTGTATCC | |
| | | | | | | CAAUC | | UUCUAGG | | CACAAUA | | UUCUAGG | | CACAATC | |
| NM_ | 1873- | asgsaau(Uhd)UfgU | 1892 | VPusGfsauuGfuGfGfga | 2226 | AGAAUUUG | 2560 | GGAUUGUG | 2894 | AGAAUUU | 3228 | UGAUUGUG | 3562 | CTAGAATT | 3896 |
| 009125.2 | 1895 | fAfUfcccacaauscsa | | uaCfaAfauucusasg | | UAUCCCAC | | GGAUACAA | | GUAUCCC | | GGAUACAA | | TGTATCCC | |
| | | | | | | AAUCC | | AUUCUAG | | ACAAUCA | | AUUCUAG | | ACAATCC | |
| NM_ | 1874- | gsasauu(Uhd)GfuA | 1893 | VPusGfsgauUfgUfGfg | 2227 | GAAUUUGU | 2561 | GGGAUUGU | 2895 | GAAUUUG | 3229 | UGGAUUGU | 3563 | TAGAATTT | 3897 |
| 009125.2 | 1896 | fUfCfccacaaucscsa | | gauAfcAfaauucsusa | | AUCCCACA | | GGGAUACA | | UAUCCCA | | GGGAUACA | | GTATCCCA | |
| | | | | | | AUCCC | | AAUUCUA | | CAAUCCA | | AAUUCUA | | CAATCCC | |
| NM_ | 2238- | gsusgaa(Ahd)CfaUf | 1894 | VPusAfsaagCfuAfGfgu | 2228 | GUGAAACA | 2562 | AAAAGCUA | 2896 | GUGAAAC | 3230 | UAAAGCUA | 3564 | AAGTGAAA | 3898 |
| 009125.2 | 2260 | CfAfccuagcuususa | | gaUfgUfuucacsusu | | UCACCUAG | | GGUGAUGU | | AUCACCU | | GGUGAUGU | | CATCACCT | |
| | | | | | | CUUUU | | UUCACUU | | AGCUUUA | | UUCACUU | | AGCTTTT | |
| NM_ | 2239- | usgsaaa(Chd)AfuCf | 1895 | VPusAfsaaaGfcUfAfgg | 2229 | UGAAACAU | 2563 | GAAAAGCU | 2897 | UGAAACA | 3231 | UAAAAGCU | 3565 | AGTGAAAC | 3899 |
| 009125.2 | 2261 | AfCfcuagcuuususa | | ugAfuGfuuucascsu | | CACCUAGC | | AGGUGAUG | | UCACCUA | | AGGUGAUG | | ATCACCTA | |
| | | | | | | UUUUC | | UUUCACU | | GCUUUUA | | UUUCACU | | GCTTTTC | |
| NM_ | 2240- | gsasaac(Ahd)UfcAf | 1896 | VPusGfsaaaAfgCfUfag | 2230 | GAAACAUC | 2564 | UGAAAAGC | 2898 | GAAACAU | 3232 | UGAAAAGC | 3566 | GTGAAACA | 3900 |
| 009125.2 | 2262 | CfCfuagcuuuuscsa | | guGfaUfguuucsasc | | ACCUAGCU | | UAGGUGAU | | CACCUAG | | UAGGUGAU | | TCACCTAG | |
| | | | | | | UUUCA | | GUUUCAC | | CUUUUCA | | GUUUCAC | | CTTTTCA | |
| NM_ | 2241- | asasaca(Uhd)CfaCf | 1897 | VPusUfsgaaAfaGfCfua | 2231 | AAACAUCA | 2565 | UUGAAAAG | 2899 | AAACAUC | 3233 | UUGAAAAG | 3567 | TGAAACAT | 3901 |
| 009125.2 | 2263 | CfUfagcuuuucsasa | | ggUfgAfuguuuscsa | | CCUAGCUU | | CUAGGUGA | | ACCUAGC | | CUAGGUGA | | CACCTAGC | |
| | | | | | | UUCAA | | UGUUUCA | | UUUUCAA | | UGUUUCA | | TTTTCAA | |
| NM_ | 2242- | asascau(Chd)AfcCf | 1898 | VPusUfsugaAfaAfGfcu | 2232 | AACAUCAC | 2566 | UUUGAAAA | 2900 | AACAUCA | 3234 | UUUGAAAA | 3568 | GAAACATC | 3902 |
| 009125.2 | 2264 | UfAfgcuuuucasasa | | agGfuGfauguususc | | CUAGCUUU | | GCUAGGUG | | CCUAGCU | | GCUAGGUG | | ACCTAGCT | |
| | | | | | | UCAAA | | AUGUUUC | | UUUCAAA | | AUGUUUC | | TTTCAAA | |
| NM_ | 2243- | ascsauc(Ahd)CfcUf | 1899 | VPusUfsuugAfaAfAfgc | 2233 | ACAUCACC | 2567 | UUUUGAAA | 2901 | ACAUCAC | 3235 | UUUUGAAA | 3569 | AAACATCA | 3903 |
| 009125.2 | 2265 | AfGfcuuuucaasasa | | uaGfgUfgaugususu | | UAGCUUUU | | AGCUAGGU | | CUAGCUU | | AGCUAGGU | | CCTAGCTT | |
| | | | | | | CAAAA | | GAUGUUU | | UUCAAAA | | GAUGUUU | | TTCAAAA | |
| NM_ | 2244- | csasuca(Chd)CfuAf | 1900 | VPusUfsuuuGfaAfAfag | 2234 | CAUCACCU | 2568 | CUUUUGAA | 2902 | CAUCACC | 3236 | UUUUUGAA | 3570 | AACATCAC | 3904 |
| 009125.2 | 2266 | GfCfuuuucaaasasa | | cuAfgGfugaugsusu | | AGCUUUUC | | AAGCUAGG | | UAGCUUU | | AAGCUAGG | | CTAGCTTTT | |
| | | | | | | AAAAG | | UGAUGUU | | UCAAAAA | | UGAUGUU | | CAAAAG | |
| NM_ | 2245- | asuscac(Chd)UfaGf | 1901 | VPusCfsuuuUfgAfAfaa | 2235 | AUCACCUA | 2569 | GCUUUUGA | 2903 | AUCACCU | 3237 | UCUUUUGA | 3571 | ACATCACC | 3905 |
| 009125.2 | 2267 | CfUfuuucaaaasgsa | | gcUfaGfgugausgsu | | GCUUUUCA | | AAAGCUAG | | AGCUUUU | | AAAGCUAG | | TAGCTTTTC | |
| | | | | | | AAAGC | | GUGAUGU | | CAAAAGA | | GUGAUGU | | AAAAGC | |
| NM_ | 2246- | uscsacc(Uhd)AfgCf | 1902 | VPusGfscuuUfuGfAfaa | 2236 | UCACCUAG | 2570 | AGCUUUUG | 2904 | UCACCUA | 3238 | UGCUUUUG | 3572 | CATCACCT | 3906 |
| 009125.2 | 2268 | UfUfuucaaaagscsa | | agCfuAfggugasusg | | CUUUUCAA | | AAAAGCUA | | GCUUUUC | | AAAAGCUA | | AGCTTTTC | |
| | | | | | | AAGCU | | GGUGAUG | | AAAAGCA | | GGUGAUG | | AAAAGCT | |
| NM_ | 2247- | csasccu(Ahd)GfcUf | 1903 | VPusAfsgcuUfuUfGfaa | 2237 | CACCUAGC | 2571 | CAGCUUUU | 2905 | CACCUAG | 3239 | UAGCUUUU | 3573 | ATCACCTA | 3907 |
| 009125.2 | 2269 | UfUfucaaaagcsusa | | aaGfcUfaggugsasu | | UUUUCAAA | | GAAAAGCU | | CUUUUCA | | GAAAAGCU | | GCTTTTCA | |
| | | | | | | AGCUG | | AGGUGAU | | AAAGCUA | | AGGUGAU | | AAAGCTG | |
| NM_ | 2248- | ascscua(Ghd)CfuUf | 1904 | VPusCfsagcUfuUfUfga | 2238 | ACCUAGCU | 2572 | UCAGCUUU | 2906 | ACCUAGC | 3240 | UCAGCUUU | 3574 | TCACCTAG | 3908 |
| 009125.2 | 2270 | UfUfcaaaagcusgsa | | aaAfgCfuaggusgsa | | UUUCAAAA | | UGAAAAGC | | UUUUCAA | | UGAAAAGC | | CTTTTCAA | |
| | | | | | | GCUGA | | UAGGUGA | | AAGCUGA | | UAGGUGA | | AAGCTGA | |
| NM_ | 2249- | cscsuag(Chd)UfuUf | 1905 | VPusUfscagCfuUfUfug | 2239 | CCUAGCUU | 2573 | GUCAGCUU | 2907 | CCUAGCU | 3241 | UUCAGCUU | 3575 | CACCTAGC | 3909 |
| 009125.2 | 2271 | UfCfaaaagcugsasa | | aaAfaGfcuaggsusg | | UUCAAAAG | | UUGAAAAG | | UUUCAAA | | UUGAAAAG | | TTTTCAAA | |
| | | | | | | CUGAC | | CUAGGUG | | AGCUGAA | | CUAGGUG | | AGCTGAC | |
| NM_ | 2364- | csasucu(Ghd)AfaUf | 1906 | VPusUfsugaUfcCfAfua | 2240 | CAUCUGAA | 2574 | GUUGAUCC | 2908 | CAUCUGA | 3242 | UUUGAUCC | 3576 | TACATCTG | 3910 |
| 009125.2 | 2386 | CfUfauggaucasasa | | gaUfuCfagaugsusa | | UCUAUGGA | | AUAGAUUC | | AUCUAUG | | AUAGAUUC | | AATCTATG | |
| | | | | | | UCAAC | | AGAUGUA | | GAUCAAA | | AGAUGUA | | GATCAAC | |
| NM_ | 2365- | asuscug(Ahd)AfuC | 1907 | VPusGfsuugAfuCfCfau | 2241 | AUCUGAAU | 2575 | AGUUGAUC | 2909 | AUCUGAA | 3243 | UGUUGAUC | 3577 | ACATCTGA | 3911 |
| 009125.2 | 2387 | fUfAfuggaucaascsa | | agAfuUfcagausgsu | | CUAUGGAU | | CAUAGAUU | | UCUAUGG | | CAUAGAUU | | ATCTATGG | |
| | | | | | | CAACU | | CAGAUGU | | AUCAACA | | CAGAUGU | | ATCAACT | |
| NM_ | 2366- | uscsuga(Ahd)UfcU | 1908 | VPusAfsguuGfaUfCfca | 2242 | UCUGAAUC | 2576 | UAGUUGAU | 2910 | UCUGAAU | 3244 | UAGUUGAU | 3578 | CATCTGAA | 3912 |
| 009125.2 | 2388 | fAfUfggaucaacsusa | | uaGfaUfucagasusg | | UAUGGAUC | | CCAUAGAU | | CUAUGGA | | CCAUAGAU | | TCTATGGA | |
| | | | | | | AACUA | | UCAGAUG | | UCAACUA | | UCAGAUG | | TCAACTA | |
| NM_ | 2366- | uscsuga(Ahd)UfcU | 1909 | VPusAfsguuGfaUfCfca | 2243 | UCUGAAUC | 2577 | UAGUUGAU | 2911 | UCUGAAU | 3245 | UAGUUGAU | 3579 | CTTCTGAA | 3913 |
| 009125.2 | 2388 | fAfUfggaucaacsusa | | uaGfaUfucagasusg | | UAUGGAUC | | CCAUAGAU | | CUAUGGA | | CCAUAGAU | | TCTATGGA | |
| | | | | | | AACUA | | UCAGAUG | | UCAACUA | | UCAGAUG | | TCAACTA | |
| NM_ | 2367- | csusgaa(Uhd)CfuAf | 1910 | VPusUfsaguUfgAfUfcc | 2244 | CUGAAUCU | 2578 | GUAGUUGA | 2912 | CUGAAUC | 3246 | UUAGUUGA | 3580 | ATCTGAAT | 3914 |
| 009125.2 | 2389 | UfGfgaucaacusasa | | auAfgAfuucagsasu | | AUGGAUCA | | UCCAUAGA | | UAUGGAU | | UCCAUAGA | | CTATGGAT | |
| | | | | | | ACUAC | | UUCAGAU | | CAACUAA | | UUCAGAU | | CAACTAC | |
| NM_ | 2367- | csusgaa(Uhd)CfuAf | 1911 | VPusUfsaguUfgAfUfcc | 2245 | CUGAAUCU | 2579 | AUAGUUGA | 2913 | CUGAAUC | 3247 | UUAGUUGA | 3581 | TTCTGAAT | 3915 |
| 009125.2 | 2389 | UfGfgaucaacusasa | | auAfgAfuucagsasu | | AUGGAUCA | | UCCAUAGA | | UAUGGAU | | UCCAUAGA | | CTATGGAT | |
| | | | | | | ACUAU | | UUCAGAU | | CAACUAA | | UUCAGAU | | CAACTAC | |
| NM_ | 2371- | asuscua(Uhd)GfgA | 1912 | VPusUfsuagUfaGfUfug | 2246 | AUCUAUGG | 2580 | CUUAGUAG | 2914 | AUCUAUG | 3248 | UUUAGUAG | 3582 | GAATCTAT | 3916 |
| 009125.2 | 2393 | fUfCfaacuacuasasa | | auCfcAfuagaususc | | AUCAACUA | | UUGAUCCA | | GAUCAAC | | UUGAUCCA | | GGATCAAC | |
| | | | | | | CUAAG | | UAGAUUC | | UACUAAA | | UAGAUUC | | TACTAAG | |
| NM_ | 2372- | uscsuau(Ghd)GfaU | 1913 | VPusCfsuuaGfuAfGfuu | 2247 | UCUAUGGA | 2581 | GCUUAGUA | 2915 | UCUAUGG | 3249 | UCUUAGUA | 3583 | AATCTATG | 3917 |
| 009125.2 | 2394 | fCfAfacuacuaasgsa | | gaUfcCfauagasusu | | UCAACUAC | | GUUGAUCC | | AUCAACU | | GUUGAUCC | | GATCAACT | |
| | | | | | | UAAGC | | AUAGAUU | | ACUAAGA | | AUAGAUU | | ACTAAGC | |
| NM_ | 2373- | csusaug(Ghd)AfuC | 1914 | VPusGfscuuAfgUfAfg | 2248 | CUAUGGAU | 2582 | UGCUUAGU | 2916 | CUAUGGA | 3250 | UGCUUAGU | 3584 | ATCTATGG | 3918 |
| 009125.2 | 2395 | fAfAfcuacuaagscsa | | uugAfuCfcauagsasu | | CAACUACU | | AGUUGAUC | | UCAACUA | | AGUUGAUC | | ATCAACTA | |
| | | | | | | AAGCA | | CAUAGAU | | CUAAGCA | | CAUAGAU | | CTAAGCA | |
| NM_ | 2374- | usasugg(Ahd)UfcA | 1915 | VPusUfsgcuUfaGfUfag | 2249 | UAUGGAUC | 2583 | UUGCUUAG | 2917 | UAUGGAU | 3251 | UUGCUUAG | 3585 | TCTATGGA | 3919 |
| 009125.2 | 2396 | fAfCfuacuaagcsasa | | uuGfaUfccauasgsa | | AACUACUA | | UAGUUGAU | | CAACUAC | | UAGUUGAU | | TCAACTAC | |
| | | | | | | AGCAA | | CCAUAGA | | UAAGCAA | | CCAUAGA | | TAAGCAA | |
| NM_ | 2375- | asusgga(Uhd)CfaAf | 1916 | VPusUfsugcUfuAfGfua | 2250 | AUGGAUCA | 2584 | UUUGCUUA | 2918 | AUGGAUC | 3252 | UUUGCUUA | 3586 | CTATGGAT | 3920 |
| 009125.2 | 2397 | CfUfacuaagcasasa | | guUfgAfuccausasg | | ACUACUAA | | GUAGUUGA | | AACUACU | | GUAGUUGA | | CAACTACT | |
| | | | | | | GCAAA | | UCCAUAG | | AAGCAAA | | UCCAUAG | | AAGCAAA | |
| NM_ | 2376- | usgsgau(Chd)AfaCf | 1917 | VPusUfsuugCfuUfAfg | 2251 | UGGAUCAA | 2585 | UUUUGCUU | 2919 | UGGAUCA | 3253 | UUUUGCUU | 3587 | TATGGATC | 3921 |
| 009125.2 | 2398 | UfAfcuaagcaasasa | | uagUfuGfauccasusa | | CUACUAAG | | AGUAGUUG | | ACUACUA | | AGUAGUUG | | AACTACTA | |
| | | | | | | CAAAA | | AUCCAUA | | AGCAAAA | | AUCCAUA | | AGCAAAA | |
| NM_ | 2377- | gsgsauc(Ahd)AfcU | 1918 | VPusUfsuuuGfcUfUfag | 2252 | GGAUCAAC | 2586 | UUUUUGCU | 2920 | GGAUCAA | 3254 | UUUUUGCU | 3588 | ATGGATCA | 3922 |
| 009125.2 | 2399 | fAfCfuaagcaaasasa | | uaGfuUfgauccsasu | | UACUAAGC | | UAGUAGUU | | CUACUAA | | UAGUAGUU | | ACTACTAA | |
| | | | | | | AAAAA | | GAUCCAU | | GCAAAAA | | GAUCCAU | | GCAAAAA | |
| NM_ | 2378- | gsasuca(Ahd)CfuAf | 1919 | VPusUfsuuuUfgCfUfua | 2253 | GAUCAACU | 2587 | AUUUUUGC | 2921 | GAUCAAC | 3255 | UUUUUUGC | 3589 | TGGATCAA | 3923 |
| 009125.2 | 2400 | CfUfaagcaaaasasa | | guAfgUfugaucscsa | | ACUAAGCA | | UUAGUAGU | | UACUAAG | | UUAGUAGU | | CTACTAAG | |
| | | | | | | AAAAU | | UGAUCCA | | CAAAAAA | | UGAUCCA | | CAAAAAT | |
| NM_ | 2403- | asasgga(Ghd)AfaAf | 1920 | VPusAfsucuCfgUfGfac | 2254 | AAGGAGAA | 2588 | AAUCUCGU | 2922 | AAGGAGA | 3256 | UAUCUCGU | 3590 | AGAAGGAG | 3924 |
| 009125.2 | 2425 | AfGfucacgagasusa | | uuUfuCfuccuuscsu | | AAGUCACG | | GACUUUUC | | AAAGUCA | | GACUUUUC | | AAAAGTCA | |
| | | | | | | AGAUU | | UCCUUCU | | CGAGAUA | | UCCUUCU | | CGAGATT | |
| NM_ | 2695- | gsgsagu(Uhd)CfaA | 1921 | VPusAfsagaAfcGfAfgg | 2255 | GGAGUUCA | 2589 | AAAGAACG | 2923 | GGAGUUC | 3257 | UAAGAACG | 3591 | AAGGAGTT | 3925 |
| 009125.2 | 2717 | fCfCfcucguucususa | | guUfgAfacuccsusu | | ACCCUCGU | | AGGGUUGA | | AACCCUC | | AGGGUUGA | | CAACCCTC | |
| | | | | | | UCUUU | | ACUCCUU | | GUUCUUA | | ACUCCUU | | GTTCTTT | |
| NM_ | 2698- | gsusuca(Ahd)CfcCf | 1922 | VPusAfsgaaAfgAfAfcg | 2256 | GUUCAACC | 2590 | GAGAAAGA | 2924 | GUUCAAC | 3258 | UAGAAAGA | 3592 | GAGTTCAA | 3926 |
| 009125.2 | 2720 | UfCfguucuuucsusa | | agGfgUfugaacsusc | | CUCGUUCU | | ACGAGGGU | | CCUCGUU | | ACGAGGGU | | CCCTCGTT | |
| | | | | | | UUCUC | | UGAACUC | | CUUUCUA | | UGAACUC | | CTTTCTC | |
| NM_ | 2699- | ususcaa(Chd)CfcUf | 1923 | VPusGfsagaAfaGfAfac | 2257 | UUCAACCC | 2591 | AGAGAAAG | 2925 | UUCAACC | 3259 | UGAGAAAG | 3593 | AGTTCAAC | 3927 |
| 009125.2 | 2721 | CfGfuucuuucuscsa | | gaGfgGfuugaascsu | | UCGUUCUU | | AACGAGGG | | CUCGUUC | | AACGAGGG | | CCTCGTTCT | |
| | | | | | | UCUCU | | UUGAACU | | UUUCUCA | | UUGAACU | | TTCTCT | |
| NM_ | 2700- | uscsaac(Chd)CfuCf | 1924 | VPusAfsgagAfaAfGfaa | 2258 | UCAACCCU | 2592 | GAGAGAAA | 2926 | UCAACCC | 3260 | UAGAGAAA | 3594 | GTTCAACC | 3928 |
| 009125.2 | 2722 | GfUfucuuucucsusa | | cgAfgGfguugasasc | | CGUUCUUU | | GAACGAGG | | UCGUUCU | | GAACGAGG | | CTCGTTCTT | |
| | | | | | | CUCUC | | GUUGAAC | | UUCUCUA | | GUUGAAC | | TCTCTC | |
| NM_ | 2701- | csasacc(Chd)UfcGf | 1925 | VPusGfsagaGfaAfAfga | 2259 | CAACCCUC | 2593 | UGAGAGAA | 2927 | CAACCCU | 3261 | UGAGAGAA | 3595 | TTCAACCC | 3929 |
| 009125.2 | 2723 | UfUfcuuucucuscsa | | acGfaGfgguugsasa | | GUUCUUUC | | AGAACGAG | | CGUUCUU | | AGAACGAG | | TCGTTCTTT | |
| | | | | | | UCUCA | | GGUUGAA | | UCUCUCA | | GGUUGAA | | CTCTCA | |
| NM_ | 2702- | asasccc(Uhd)CfgUf | 1926 | VPusUfsgagAfgAfAfag | 2260 | AACCCUCG | 2594 | CUGAGAGA | 2928 | AACCCUC | 3262 | UUGAGAGA | 3596 | TCAACCCT | 3930 |
| 009125.2 | 2724 | UfCfuuucucucsasa | | aaCfgAfggguusgsa | | UUCUUUCU | | AAGAACGA | | GUUCUUU | | AAGAACGA | | CGTTCTTTC | |
| | | | | | | CUCAG | | GGGUUGA | | CUCUCAA | | GGGUUGA | | TCTCAG | |
| NM_ | 2708- | csgsuuc(Uhd)UfuC | 1927 | VPusUfsuugGfcUfGfag | 2261 | CGUUCUUU | 2595 | CUUUGGCU | 2929 | CGUUCUU | 3263 | UUUUGGCU | 3597 | CTCGTTCTT | 3931 |
| 009125.2 | 2730 | fUfCfucagccaasasa | | agAfaAfgaacgsasg | | CUCUCAGC | | GAGAGAAA | | UCUCUCA | | GAGAGAAA | | TCTCTCAG | |
| | | | | | | CAAAG | | GAACGAG | | GCCAAAA | | GAACGAG | | CCAAAG | |
| NM_ | 2709- | gsusucu(Uhd)UfcU | 1928 | VPusCfsuuuGfgCfUfga | 2262 | GUUCUUUC | 2596 | GCUUUGGC | 2930 | GUUCUUU | 3264 | UCUUUGGC | 3598 | TCGTTCTTT | 3932 |
| 009125.2 | 2731 | fCfUfcagccaaasgsa | | gaGfaAfagaacsgsa | | UCUCAGCC | | UGAGAGAA | | CUCUCAG | | UGAGAGAA | | CTCTCAGC | |
| | | | | | | AAAGC | | AGAACGA | | CCAAAGA | | AGAACGA | | CAAAGC | |
| NM_ | 3143- | asgsucc(Uhd)GfuCf | 1929 | VPusUfsuacCfuUfGfua | 2263 | AGUCCUGU | 2597 | AUUACCUU | 2931 | AGUCCUG | 3265 | UUUACCUU | 3599 | ACAGTCCT | 3933 |
| 009125.2 | 3165 | AfUfacaagguasasa | | ugAfcAfggacusgsu | | CAUACAAG | | GUAUGACA | | UCAUACA | | GUAUGACA | | GTCATACA | |
| | | | | | | GUAAU | | GGACUGU | | AGGUAAA | | GGACUGU | | AGGTAAT | |
| NM_ | 3144- | gsusccu(Ghd)UfcA | 1930 | VPusAfsuuaCfcUfUfgu | 2264 | GUCCUGUC | 2598 | CAUUACCU | 2932 | GUCCUGU | 3266 | UAUUACCU | 3600 | CAGTCCTG | 3934 |
| 009125.2 | 3166 | fUfAfcaagguaasusa | | auGfaCfaggacsusg | | AUACAAGG | | UGUAUGAC | | CAUACAA | | UGUAUGAC | | TCATACAA | |
| | | | | | | UAAUG | | AGGACUG | | GGUAAUA | | AGGACUG | | GGTAATG | |
| NM_ | 3148- | usgsuca(Uhd)AfcA | 1931 | VPusUfsggcAfuUfAfcc | 2265 | UGUCAUAC | 2599 | CUGGCAUU | 2933 | UGUCAUA | 3267 | UUGGCAUU | 3601 | CCTGTCAT | 3935 |
| 009125.2 | 3170 | fAfGfguaaugccsasa | | uuGfuAfugacasgsg | | AAGGUAAU | | ACCUUGUA | | CAAGGUA | | ACCUUGUA | | ACAAGGTA | |
| | | | | | | GCCAG | | UGACAGG | | AUGCCAA | | UGACAGG | | ATGCCAG | |
| NM_ | 3149- | gsuscau(Ahd)CfaAf | 1932 | VPusCfsuggCfaUfUfac | 2266 | GUCAUACA | 2600 | CCUGGCAU | 2934 | GUCAUAC | 3268 | UCUGGCAU | 3602 | CTGTCATA | 3936 |
| 009125.2 | 3171 | GfGfuaaugccasgsa | | cuUfgUfaugacsasg | | AGGUAAUG | | UACCUUGU | | AAGGUAA | | UACCUUGU | | CAAGGTAA | |
| | | | | | | CCAGG | | AUGACAG | | UGCCAGA | | AUGACAG | | TGCCAGG | |
| NM_ | 3303- | uscsuac(Uhd)UfuG | 1933 | VPusGfsgugGfaAfAfu | 2267 | UCUACUUU | 2601 | CGGUGGAA | 2935 | UCUACUU | 3269 | UGGUGGAA | 3603 | TTTCTACTT | 3937 |
| 009125.2 | 3325 | fCfCfauuuccacscsa | | ggcAfaAfguagasasa | | GCCAUUUC | | AUGGCAAA | | UGCCAUU | | AUGGCAAA | | TGCCATTT | |
| | | | | | | CACCG | | GUAGAAA | | UCCACCA | | GUAGAAA | | CCACCG | |
| NM_ | 3950- | asasgca(Chd)AfgAf | 1934 | VPusAfsguuCfuAfGfu | 2268 | AAGCACAG | 2602 | AAGUUCUA | 2936 | AAGCACA | 3270 | UAGUUCUA | 3604 | GGAAGCAC | 3938 |
| 009125.2 | 3972 | AfAfacuagaacsusa | | uuuCfuGfugcuuscsc | | AAAACUAG | | GUUUUCUG | | GAAAACU | | GUUUUCUG | | AGAAAACT | |
| | | | | | | AACUU | | UGCUUCC | | AGAACUA | | UGCUUCC | | AGAACTT | |
| NM_ | 3952- | gscsaca(Ghd)AfaAf | 1935 | VPusGfsaagUfuCfUfag | 2269 | GCACAGAA | 2603 | UGAAGUUC | 2937 | GCACAGA | 3271 | UGAAGUUC | 3605 | AAGCACAG | 3939 |
| 009125.2 | 3974 | AfCfuagaacuuscsa | | uuUfuCfugugcsusu | | AACUAGAA | | UAGUUUUC | | AAACUAG | | UAGUUUUC | | AAAACTAG | |
| | | | | | | CUUCA | | UGUGCUU | | AACUUCA | | UGUGCUU | | AACTTCA | |
| NM_ | 3954- | ascsaga(Ahd)AfaCf | 1936 | VPusAfsugaAfgUfUfcu | 2270 | ACAGAAAA | 2604 | AAUGAAGU | 2938 | ACAGAAA | 3272 | UAUGAAGU | 3606 | GCACAGAA | 3940 |
| 009125.2 | 3976 | UfAfgaacuucasusa | | agUfuUfucugusgsc | | CUAGAACU | | UCUAGUUU | | ACUAGAA | | UCUAGUUU | | AACTAGAA | |
| | | | | | | UCAUU | | UCUGUGC | | CUUCAUA | | UCUGUGC | | CTTCATT | |
| NM_ | 3955- | csasgaa(Ahd)AfcUf | 1937 | VPusAfsaugAfaGfUfuc | 2271 | CAGAAAAC | 2605 | CAAUGAAG | 2939 | CAGAAAA | 3273 | UAAUGAAG | 3607 | CACAGAAA | 3941 |
| 009125.2 | 3977 | AfGfaacuucaususa | | uaGfuUfuucugsusg | | UAGAACUU | | UUCUAGUU | | CUAGAAC | | UUCUAGUU | | ACTAGAAC | |
| | | | | | | CAUUG | | UUCUGUG | | UUCAUUA | | UUCUGUG | | TTCATTG | |
| NM_ | 4134- | usgscuu(Ghd)CfuG | 1938 | VPusAfscuuCfcAfGfuu | 2272 | UGCUUGCU | 2606 | AACUUCCA | 2940 | UGCUUGC | 3274 | UACUUCCA | 3608 | TCTGCTTG | 3942 |
| 009125.2 | 4156 | fAfAfacuggaagsusa | | ucAfgCfaagcasgsa | | GAAACUGG | | GUUUCAGC | | UGAAACU | | GUUUCAGC | | CTGAAACT | |
| | | | | | | AAGUU | | AAGCAGA | | GGAAGUA | | AAGCAGA | | GGAAGTT | |
| NM_ | 4140- | csusgaa(Ahd)CfuGf | 1939 | VPusUfsaaaUfaAfCfuu | 2273 | CUGAAACU | 2607 | AUAAAUAA | 2941 | CUGAAAC | 3275 | UUAAAUAA | 3609 | TGCTGAAA | 3943 |
| 009125.2 | 4162 | GfAfaguuauuusasa | | ccAfgUfuucagscsa | | GGAAGUUA | | CUUCCAGU | | UGGAAGU | | CUUCCAGU | | CTGGAAGT | |
| | | | | | | UUUAU | | UUCAGCA | | UAUUUAA | | UUCAGCA | | TATTTAT | |
| NM_ | 4141- | usgsaaa(Chd)UfgGf | 1940 | VPusAfsuaaAfuAfAfcu | 2274 | UGAAACUG | 2608 | AAUAAAUA | 2942 | UGAAACU | 3276 | UAUAAAUA | 3610 | GCTGAAAC | 3944 |
| 009125.2 | 4163 | AfAfguuauuuasusa | | ucCfaGfuuucasgsc | | GAAGUUAU | | ACUUCCAG | | GGAAGUU | | ACUUCCAG | | TGGAAGTT | |
| | | | | | | UUAUU | | UUUCAGC | | AUUUAUA | | UUUCAGC | | ATTTATT | |
| NM_ | 4142- | gsasaac(Uhd)GfgAf | 1941 | VPusAfsauaAfaUfAfac | 2275 | GAAACUGG | 2609 | AAAUAAAU | 2943 | GAAACUG | 3277 | UAAUAAAU | 3611 | CTGAAACT | 3945 |
| 009125.2 | 4164 | AfGfuuauuuaususa | | uuCfcAfguuucsasg | | AAGUUAUU | | AACUUCCA | | GAAGUUA | | AACUUCCA | | GGAAGTTA | |
| | | | | | | UAUUU | | GUUUCAG | | UUUAUUA | | GUUUCAG | | TTTATTT | |
| NM_ | 4142- | gsasaac(Uhd)GfgAf | 1942 | VPusAfsauaAfaUfAfac | 2276 | GAAACUGG | 2610 | AAAUAAAU | 2944 | GAAACUG | 3278 | UAAUAAAU | 3612 | CCGAAACT | 3946 |
| 009125.2 | 4164 | AfGfuuauuuaususa | | uuCfcAfguuucsasg | | AAGUUAUU | | AACUUCCA | | GAAGUUA | | AACUUCCA | | GGAAGTTA | |
| | | | | | | UAUUU | | GUUUCAG | | UUUAUUA | | GUUUCAG | | TTTATTT | |
| NM_ | 4174- | ususgag(Ahd)GfuC | 1943 | VPusGfsaugUfgUfUfca | 2277 | UUGAGAGU | 2611 | UGAUGUGU | 2945 | UUGAGAG | 3279 | UGAUGUGU | 3613 | CCTTGAGA | 3947 |
| 009125.2 | 4196 | fAfUfgaacacauscsa | | ugAfcUfcucaasgsg | | CAUGAACA | | UCAUGACU | | UCAUGAA | | UCAUGACU | | GTCATGAA | |
| | | | | | | CAUCA | | CUCAAGG | | CACAUCA | | CUCAAGG | | CACATCA | |
| NM_ | 4179- | asgsuca(Uhd)GfaAf | 1944 | VPusUfsagcUfgAfUfgu | 2278 | AGUCAUGA | 2612 | CUAGCUGA | 2946 | AGUCAUG | 3280 | UUAGCUGA | 3614 | AGAGTCAT | 3948 |
| 009125.2 | 4201 | CfAfcaucagcusasa | | guUfcAfugacuscsu | | ACACAUCA | | UGUGUUCA | | AACACAU | | UGUGUUCA | | GAACACAT | |
| | | | | | | GCUAG | | UGACUCU | | CAGCUAA | | UGACUCU | | CAGCTAG | |
| NM_ | 4179- | asgsuca(Uhd)GfaAf | 1945 | VPusUfsagcUfgAfUfgu | 2279 | AGUCAUGA | 2613 | AUAGCUGA | 2947 | AGUCAUG | 3281 | UUAGCUGA | 3615 | AAAGTCAT | 3949 |
| 009125.2 | 4201 | CfAfcaucagcusasa | | guUfcAfugacuscsu | | ACACAUCA | | UGUGUUCA | | AACACAU | | UGUGUUCA | | GAACACAT | |
| | | | | | | GCUAU | | UGACUCU | | CAGCUAA | | UGACUCU | | CAGCTAG | |
| NM_ | 4180- | gsuscau(Ghd)AfaCf | 1946 | VPusCfsuagCfuGfAfug | 2280 | GUCAUGAA | 2614 | GCUAGCUG | 2948 | GUCAUGA | 3282 | UCUAGCUG | 3616 | GAGTCATG | 3950 |
| 009125.2 | 4202 | AfCfaucagcuasgsa | | ugUfuCfaugacsusc | | CACAUCAG | | AUGUGUUC | | ACACAUC | | AUGUGUUC | | AACACATC | |
| | | | | | | CUAGC | | AUGACUC | | AGCUAGA | | AUGACUC | | AGCTAGC | |
| NM_ | 4180- | gsuscau(Ghd)AfaCf | 1947 | VPusCfsuagCfuGfAfug | 2281 | GUCAUGAA | 2615 | ACUAGCTG | 2949 | GUCAUGA | 3283 | UCUAGCUG | 3617 | AAGTCATG | 3951 |
| 009125.2 | 4202 | AfCfaucagcuasgsa | | ugUfuCfaugacsusc | | CACAUCAG | | AUGUGUUC | | ACACAUC | | AUGUGUUC | | AACACATC | |
| | | | | | | CUAGU | | AUGACUC | | AGCUAGA | | AUGACUC | | AGCTAGC | |
| NM_ | 4183- | asusgaa(Chd)AfcAf | 1948 | VPusUfsugcUfaGfCfug | 2282 | AUGAACAC | 2616 | GUUGCUAG | 2950 | AUGAACA | 3284 | UUUGCUAG | 3618 | TCATGAAC | 3952 |
| 009125.2 | 4205 | UfCfagcuagcasasa | | auGfuGfuucausgsa | | AUCAGCUA | | CUGAUGUG | | CAUCAGC | | CUGAUGUG | | ACATCAGC | |
| | | | | | | GCAAC | | UUCAUGA | | UAGCAAA | | UUCAUGA | | TAGCAAC | |
| NM_ | 4184- | usgsaac(Ahd)CfaUf | 1949 | VPusGfsuugCfuAfGfcu | 2283 | UGAACACA | 2617 | UGUUGCUA | 2951 | UGAACAC | 3285 | UGUUGCUA | 3619 | CATGAACA | 3953 |
| 009125.2 | 4206 | CfAfgcuagcaascsa | | gaUfgUfguucasusg | | UCAGCUAG | | GCUGAUGU | | AUCAGCU | | GCUGAUGU | | CATCAGCT | |
| | | | | | | CAACA | | GUUCAUG | | AGCAACA | | GUUCAUG | | AGCAACA | |
| NM_ | 4191- | asuscag(Chd)UfaGf | 1950 | VPusUfsacuUfcUfGfuu | 2284 | AUCAGCUA | 2618 | UUACUUCU | 2952 | AUCAGCU | 3286 | UUACUUCU | 3620 | ACATCAGC | 3954 |
| 009125.2 | 4213 | CfAfacagaagusasa | | gcUfaGfcugausgsu | | GCAACAGA | | GUUGCUAG | | AGCAACA | | GUUGCUAG | | TAGCAACA | |
| | | | | | | AGUAA | | CUGAUGU | | GAAGUAA | | CUGAUGU | | GAAGTAA | |
| NM_ | 4193- | csasgcu(Ahd)GfcAf | 1951 | VPusGfsuuaCfuUfCfug | 2285 | CAGCUAGC | 2619 | UGUUACUU | 2953 | CAGCUAG | 3287 | UGUUACUU | 3621 | ATCAGCTA | 3955 |
| 009125.2 | 4215 | AfCfagaaguaascsa | | uuGfcUfagcugsasu | | AACAGAAG | | CUGUUGCU | | CAACAGA | | CUGUUGCU | | GCAACAGA | |
| | | | | | | UAACA | | AGCUGAU | | AGUAACA | | AGCUGAU | | AGTAACA | |
| NM_ | 4196- | csusagc(Ahd)AfcAf | 1952 | VPusCfsuugUfuAfCfuu | 2286 | CUAGCAAC | 2620 | UCUUGUUA | 2954 | CUAGCAA | 3288 | UCUUGUUA | 3622 | AGCTAGCA | 3956 |
| 009125.2 | 4218 | GfAfaguaacaasgsa | | cuGfuUfgcuagscsu | | AGAAGUAA | | CUUCUGUU | | CAGAAGU | | CUUCUGUU | | ACAGAAGT | |
| | | | | | | CAAGA | | GCUAGCU | | AACAAGA | | GCUAGCU | | AACAAGA | |
| NM_ | 4197- | usasgca(Ahd)CfaGf | 1953 | VPusUfscuuGfuUfAfcu | 2287 | UAGCAACA | 2621 | CUCUUGUU | 2955 | UAGCAAC | 3289 | UUCUUGUU | 3623 | GCTAGCAA | 3957 |
| 009125.2 | 4219 | AfAfguaacaagsasa | | ucUfgUfugcuasgsc | | GAAGUAAC | | ACUUCUGU | | AGAAGUA | | ACUUCUGU | | CAGAAGTA | |
| | | | | | | AAGAG | | UGCUAGC | | ACAAGAA | | UGCUAGC | | ACAAGAG | |
| NM_ | 4204- | asgsaag(Uhd)AfaCf | 1954 | VPusGfsaauCfaCfUfcu | 2288 | AGAAGUAA | 2622 | AGAAUCAC | 2956 | AGAAGUA | 3290 | UGAAUCAC | 3624 | ACAGAAGT | 3958 |
| 009125.2 | 4226 | AfAfgagugauuscsa | | ugUfuAfcuucusgsu | | CAAGAGUG | | UCUUGUUA | | ACAAGAG | | UCUUGUUA | | AACAAGAG | |
| | | | | | | AUUCU | | CUUCUGU | | UGAUUCA | | CUUCUGU | | TGATTCT | |
| NM_ | 4204- | asgsaag(Uhd)AfaCf | 1955 | VPusGfsaauCfaCfUfcu | 2289 | AGAAGUAA | 2623 | AGAAUCAC | 2957 | AGAAGUA | 3291 | UGAAUCAC | 3625 | AAAGAAGT | 3959 |
| 009125.2 | 4226 | AfAfgagugauuscsa | | ugUfuAfcuucusgsu | | CAAGAGUG | | UCUUGUUA | | ACAAGAG | | UCUUGUUA | | AACAAGAG | |
| | | | | | | AUUCU | | CUUCUGU | | UGAUUCA | | CUUCUGU | | TGATTCT | |
| NM_ | 4223- | csusugc(Uhd)GfcU | 1956 | VPusAfsaagCfgGfUfaa | 2290 | CUUGCUGC | 2624 | UAAAGCGG | 2958 | CUUGCUG | 3292 | UAAAGCGG | 3626 | TTCTTGCTG | 3960 |
| 009125.2 | 4245 | fAfUfuaccgcuususa | | uaGfcAfgcaagsasa | | UAUUACCG | | UAAUAGCA | | CUAUUAC | | UAAUAGCA | | CTATTACC | |
| | | | | | | CUUUA | | GCAAGAA | | CGCUUUA | | GCAAGAA | | GCTTTA | |
| NM_ | 4226- | gscsugc(Uhd)AfuU | 1957 | VPusUfsuuaAfaGfCfgg | 2291 | GCUGCUAU | 2625 | UUUUAAAG | 2959 | GCUGCUA | 3293 | UUUUAAAG | 3627 | TTGCTGCT | 3961 |
| 009125.2 | 4248 | fAfCfcgcuuuaasasa | | uaAfuAfgcagcsasa | | UACCGCUU | | CGGUAAUA | | UUACCGC | | CGGUAAUA | | ATTACCGC | |
| | | | | | | UAAAA | | GCAGCAA | | UUUAAAA | | GCAGCAA | | TTTAAAA | |
| NM_ | 4270- | cscscuu(Uhd)UfaCf | 1958 | VPusUfsgucAfaGfUfuu | 2292 | CCCUUUUA | 2626 | CUGUCAAG | 2960 | CCCUUUU | 3294 | UUGUCAAG | 3628 | CGCCCTTTT | 3962 |
| 009125.2 | 4292 | UfAfaacuugacsasa | | agUfaAfaagggscsg | | CUAAACUU | | UUUAGUAA | | ACUAAAC | | UUUAGUAA | | ACTAAACT | |
| | | | | | | GACAG | | AAGGGCG | | UUGACAA | | AAGGGCG | | TGACAG | |
| NM_ | 4272- | csusuuu(Ahd)CfuA | 1959 | VPusUfscugUfcAfAfgu | 2293 | CUUUUACU | 2627 | UUCUGUCA | 2961 | CUUUUAC | 3295 | UUCUGUCA | 3629 | CCCTTTTAC | 3963 |
| 009125.2 | 4294 | fAfAfcuugacagsasa | | uuAfgUfaaaagsgsg | | AAACUUGA | | AGUUUAGU | | UAAACUU | | AGUUUAGU | | TAAACTTG | |
| | | | | | | CAGAA | | AAAAGGG | | GACAGAA | | AAAAGGG | | ACAGAA | |
| NM_ | 4273- | ususuua(Chd)UfaA | 1960 | VPusUfsucuGfuCfAfag | 2294 | UUUUACUA | 2628 | CUUCUGUC | 2962 | UUUUACU | 3296 | UUUCUGUC | 3630 | CCTTTTACT | 3964 |
| 009125.2 | 4295 | fAfCfuugacagasasa | | uuUfaGfuaaaasgsg | | AACUUGAC | | AAGUUUAG | | AAACUUG | | AAGUUUAG | | AAACTTGA | |
| | | | | | | AGAAG | | UAAAAGG | | ACAGAAA | | UAAAAGG | | CAGAAG | |
| NM_ | 4276- | usascua(Ahd)AfcUf | 1961 | VPusAfsacuUfcUfGfuc | 2295 | UACUAAAC | 2629 | GAACUUCU | 2963 | UACUAAA | 3297 | UAACUUCU | 3631 | TTTACTAA | 3965 |
| 009125.2 | 4298 | UfGfacagaagususa | | aaGfuUfuaguasasa | | UUGACAGA | | GUCAAGUU | | CUUGACA | | GUCAAGUU | | ACTTGACA | |
| | | | | | | AGUUC | | UAGUAAA | | GAAGUUA | | UAGUAAA | | GAAGTTC | |
| NM_ | 4278- | csusaaa(Chd)UfuGf | 1962 | VPusUfsgaaCfuUfCfug | 2296 | CUAAACUU | 2630 | CUGAACUU | 2964 | CUAAACU | 3298 | UUGAACUU | 3632 | TACTAAAC | 3966 |
| 009125.2 | 4300 | AfCfagaaguucsasa | | ucAfaGfuuuagsusa | | GACAGAAG | | CUGUCAAG | | UGACAGA | | CUGUCAAG | | TTGACAGA | |
| | | | | | | UUCAG | | UUUAGUA | | AGUUCAA | | UUUAGUA | | AGTTCAG | |
| NM_ | 4282- | ascsuug(Ahd)CfaGf | 1963 | VPusUfsuacUfgAfAfcu | 2297 | ACUUGACA | 2631 | UUUACUGA | 2965 | ACUUGAC | 3299 | UUUACUGA | 3633 | AAACTTGA | 3967 |
| 009125.2 | 4304 | AfAfguucaguasasa | | ucUfgUfcaagususu | | GAAGUUCA | | ACUUCUGU | | AGAAGUU | | ACUUCUGU | | CAGAAGTT | |
| | | | | | | GUAAA | | CAAGUUU | | CAGUAAA | | CAAGUUU | | CAGTAAA | |
| NM_ | 4285- | usgsaca(Ghd)AfaGf | 1964 | VPusAfsauuUfaCfUfga | 2298 | UGACAGAA | 2632 | GAAUUUAC | 2966 | UGACAGA | 3300 | UAAUUUAC | 3634 | CTTGACAG | 3968 |
| 009125.2 | 4307 | UfUfcaguaaaususa | | acUfuCfugucasasg | | GUUCAGUA | | UGAACUUC | | AGUUCAG | | UGAACUUC | | AAGTTCAG | |
| | | | | | | AAUUC | | UGUCAAG | | UAAAUUA | | UGUCAAG | | TAAATTC | |
| NM_ | 4287- | ascsaga(Ahd)GfuUf | 1965 | VPusAfsgaaUfuUfAfcu | 2299 | ACAGAAGU | 2633 | AAGAAUUU | 2967 | ACAGAAG | 3301 | UAGAAUUU | 3635 | TGACAGAA | 3969 |
| 009125.2 | 4309 | CfAfguaaauucsusa | | gaAfcUfucuguscsa | | UCAGUAAA | | ACUGAACU | | UUCAGUA | | ACUGAACU | | GTTCAGTA | |
| | | | | | | UUCUU | | UCUGUCA | | AAUUCUA | | UCUGUCA | | AATTCTT | |
| NM_ | 4288- | csasgaa(Ghd)UfuCf | 1966 | VPusAfsagaAfuUfUfac | 2300 | CAGAAGUU | 2634 | UAAGAAUU | 2968 | CAGAAGU | 3302 | UAAGAAUU | 3636 | GACAGAAG | 3970 |
| 009125.2 | 4310 | AfGfuaaauucususa | | ugAfaCfuucugsusc | | CAGUAAAU | | UACUGAAC | | UCAGUAA | | UACUGAAC | | TTCAGTAA | |
| | | | | | | UCUUA | | UUCUGUC | | AUUCUUA | | UUCUGUC | | ATTCTTA | |
| NM_ | 4289- | asgsaag(Uhd)UfcAf | 1967 | VPusUfsaagAfaUfUfua | 2301 | AGAAGUUC | 2635 | GUAAGAAU | 2969 | AGAAGUU | 3303 | UUAAGAAU | 3637 | ACAGAAGT | 3971 |
| 009125.2 | 4311 | GfUfaaauucuusasa | | cuGfaAfcuucusgsu | | AGUAAAUU | | UUACUGAA | | CAGUAAA | | UUACUGAA | | TCAGTAAA | |
| | | | | | | CUUAC | | CUUCUGU | | UUCUUAA | | CUUCUGU | | TTCTTAC | |
| NM_ | 4312- | cscsaaa(Chd)UfgAf | 1968 | VPusAfsuaaUfaAfUfcc | 2302 | CCAAACUG | 2636 | AAUAAUAA | 2970 | CCAAACU | 3304 | UAUAAUAA | 3638 | CGCCAAAC | 3972 |
| 009125.2 | 4334 | CfGfgauuauuasusa | | guCfaGfuuuggscsg | | ACGGAUUA | | UCCGUCAG | | GACGGAU | | UCCGUCAG | | TGACGGAT | |
| | | | | | | UUAUU | | UUUGGCG | | UAUUAUA | | UUUGGCG | | TATTATT | |
| NM_ | 4385- | gsusuaa(Ghd)GfgA | 1969 | VPusAfsguaAfaAfGfuu | 2303 | GUUAAGGG | 2637 | AAGUAAAA | 2971 | GUUAAGG | 3305 | UAGUAAAA | 3639 | AAGTTAAG | 3973 |
| 009125.2 | 4407 | fAfAfacuuuuacsusa | | uuCfcCfuuaacsusu | | AAAACUUU | | GUUUUCCC | | GAAAACU | | GUUUUCCC | | GGAAAACT | |
| | | | | | | UACUU | | UUAACUU | | UUUACUA | | UUAACUU | | TTTACTT | |
| NM_ | 4386- | ususaag(Ghd)GfaA | 1970 | VPusAfsaguAfaAfAfgu | 2304 | UUAAGGGA | 2638 | AAAGUAAA | 2972 | UUAAGGG | 3306 | UAAGUAAA | 3640 | AGTTAAGG | 3974 |
| 009125.2 | 4408 | fAfAfcuuuuacususa | | uuUfcCfcuuaascsu | | AAACUUUU | | AGUUUUCC | | AAAACUU | | AGUUUUCC | | GAAAACTT | |
| | | | | | | ACUUU | | CUUAACU | | UUACUUA | | CUUAACU | | TTACTTT | |
| NM_ | 4387- | usasagg(Ghd)AfaA | 1971 | VPusAfsaagUfaAfAfag | 2305 | UAAGGGAA | 2639 | CAAAGUAA | 2973 | UAAGGGA | 3307 | UAAAGUAA | 3641 | GTTAAGGG | 3975 |
| 009125.2 | 4409 | fAfCfuuuuacuususa | | uuUfuCfccuuasasc | | AACUUUUA | | AAGUUUUC | | AAACUUU | | AAGUUUUC | | AAAACTTT | |
| | | | | | | CUUUG | | CCUUAAC | | UACUUUA | | CCUUAAC | | TACTTTG | |
| NM_ | 4389- | asgsgga(Ahd)AfaCf | 1972 | VPusAfscaaAfgUfAfaa | 2306 | AGGGAAAA | 2640 | UACAAAGU | 2974 | AGGGAAA | 3308 | UACAAAGU | 3642 | TAAGGGAA | 3976 |
| 009125.2 | 4411 | UfUfuuacuuugsusa | | agUfuUfucccususa | | CUUUUACU | | AAAAGUUU | | ACUUUUA | | AAAAGUUU | | AACTTTTA | |
| | | | | | | UUGUA | | UCCCUUA | | CUUUGUA | | UCCCUUA | | CTTTGTA | |
| NM_ | 4390- | gsgsgaa(Ahd)AfcU | 1973 | VPusUfsacaAfaGfUfaa | 2307 | GGGAAAAC | 2641 | CUACAAAG | 2975 | GGGAAAA | 3309 | UUACAAAG | 3643 | AAGGGAAA | 3977 |
| 009125.2 | 4412 | fUfUfuacuuugusasa | | aaGfuUfuucccsusu | | UUUUACUU | | UAAAAGUU | | CUUUUAC | | UAAAAGUU | | ACTTTTAC | |
| | | | | | | UGUAG | | UUCCCUU | | UUUGUAA | | UUCCCUU | | TTTGTAG | |
| NM_ | 4392- | gsasaaa(Chd)UfuUf | 1974 | VPusUfscuaCfaAfAfgu | 2308 | GAAAACUU | 2642 | AUCUACAA | 2976 | GAAAACU | 3310 | UUCUACAA | 3644 | GGGAAAAC | 3978 |
| 009125.2 | 4414 | UfAfcuuuguagsasa | | aaAfaGfuuuucscsc | | UUACUUUG | | AGUAAAAG | | UUUACUU | | AGUAAAAG | | TTTTACTT | |
| | | | | | | UAGAU | | UUUUCCC | | UGUAGAA | | UUUUCCC | | TGTAGAT | |
| NM_ | 4393- | asasaac(Uhd)UfuUf | 1975 | VPusAfsucuAfcAfAfag | 2309 | AAAACUUU | 2643 | UAUCUACA | 2977 | AAAACUU | 3311 | UAUCUACA | 3645 | GGAAAACT | 3979 |
| 009125.2 | 4415 | AfCfuuuguagasusa | | uaAfaAfguuuuscsc | | UACUUUGU | | AAGUAAAA | | UUACUUU | | AAGUAAAA | | TTTACTTT | |
| | | | | | | AGAUA | | GUUUUCC | | GUAGAUA | | GUUUUCC | | GTAGATA | |
| NM_ | 4393- | asasaac(Uhd)UfuUf | 1976 | VPusAfsucuAfcAfAfag | 2310 | AAAACUUU | 2644 | UAUCUACA | 2978 | AAAACUU | 3312 | UAUCUACA | 3646 | GAAAAACT | 3980 |
| 009125.2 | 4415 | AfCfuuuguagasusa | | uaAfaAfguuuuscsc | | UACUUUGU | | AAGUAAAA | | UUACUUU | | AAGUAAAA | | TTTACTTTG | |
| | | | | | | AGAUA | | GUUUUCC | | GUAGAUA | | GUUUUCC | | TAGATA | |

TABLE 10
ATXN2 C16-modified siRNA sequences also modified with 2′-O-hexadecyl-adenosine-3′-phosphate, 2′-O-hexadecyl-guanosine-
3′-phosphate, or 2′-O-hexadecyl-cytidine-3′-phosphate, or 2′-O-hexadecyl-uridine-3′-phosphate and N-[tris(GalNAc-alkyl)-
amidodecanoyl)]-4-hydroxyprolinol Hyp-(GalNAc-alkyl)3 (Hyp-(GalNAc-alkyl)3).

| | | | | | | | | | | | | sense. | | | |
|---|---|---|---|---|---|---|---|---|---|---|---|---|---|---|---|
| accession | mRNA | | | | | mRNA | | | | anti- | | trans | | antisense. | |
| version | range | Sense oligoSeq | Seq | Antisense oligoSeq | Seq | target | Seq | sense | Seq | sense | Seq | Seq | Seq | transSeq | Seq |
| NM_ | 90- | uscscga(Chd)UfuCfCfG | 3981 | VPusAfscucUfuUfAfcc | 4315 | CCTCCGAC | 4649 | UCCGACU | 4983 | GACUCUUU | 5317 | UCCGACU | 5651 | UACUCUUU | 5985 |
| 002973.3 | 112 | fguaaagaguaL96 | | ggAfaGfucggasgsg | | TTCCGGTA | | UCCGGUA | | ACCGGAAG | | UCCGGUA | | ACCGGAAG | |
| | | | | | | AAGAGTC | | AAGAGUC | | UCGGAGG | | AAGAGUA | | UCGGAGG | |
| NM_ | 91- | cscsgac(Uhd)UfcCfGfG | 3982 | VPusGfsacuCfuUfUfac | 4316 | CTCCGACT | 4650 | CCGACUU | 4984 | GGACUCUU | 5318 | CCGACUU | 5652 | UGACUCUU | 5986 |
| 002973.3 | 113 | fuaaagagucaL96 | | cgGfaAfgucggsasg | | TCCGGTAA | | CCGGUAA | | UACCGGAA | | CCGGUAA | | UACCGGAA | |
| | | | | | | AGAGTCC | | AGAGUCC | | GUCGGAG | | AGAGUCA | | GUCGGAG | |
| NM_ | 92- | csgsacu(Uhd)CfcGfGfU | 3983 | VPusGfsgacUfcUfUfua | 4317 | TCCGACTT | 4651 | CGACUUC | 4985 | GGGACUCU | 5319 | CGACUUC | 5653 | UGGACUCU | 5987 |
| 002973.3 | 114 | faaagaguccaL96 | | ccGfgAfagucgsgsa | | CCGGTAAA | | CGGUAAA | | UUACCGGA | | CGGUAAA | | UUACCGGA | |
| | | | | | | GAGTCCC | | GAGUCCC | | AGUCGGA | | GAGUCCA | | AGUCGGA | |
| NM_ | 996- | asasugu(Ghd)AfaGfUfA | 3984 | VPusUfsuucAfcUfUfgu | 4318 | CAAATGTG | 4652 | AAUGUGA | 4986 | UUUUCACU | 5320 | AAUGUGA | 5654 | UUUUCACU | 5988 |
| 002973.3 | 1018 | fcaagugaaaaL96 | | acUfuCfacauususg | | AAGTACAA | | AGUACAA | | UGUACUUC | | AGUACAA | | UGUACUUC | |
| | | | | | | GTGAAAA | | GUGAAAA | | ACAUUUG | | GUGAAAA | | ACAUUUG | |
| NM_ | 997- | asusgug(Ahd)AfgUfAfC | 3985 | VPusUfsuuuCfaCfUfug | 4319 | AAATGTGA | 4653 | AUGUGAA | 4987 | UUUUUCAC | 5321 | AUGUGAA | 5655 | UUUUUCAC | 5989 |
| 002973.3 | 1019 | faagugaaaaaL96 | | uaCfuUfcacaususu | | AGTACAAG | | GUACAAG | | UUGUACUU | | GUACAAG | | UUGUACUU | |
| | | | | | | TGAAAAA | | UGAAAAA | | CACAUUU | | UGAAAAA | | CACAUUU | |
| NM_ | 999- | gsusgaa(Ghd)UfaCfAfA | 3986 | VPusAfsuuuUfuCfAfcu | 4320 | ATGTGAAG | 4654 | GUGAAGU | 4988 | CAUUUUUC | 5322 | GUGAAGU | 5656 | UAUUUUUC | 5990 |
| 002973.3 | 1021 | fgugaaaaauaL96 | | ugUfaCfuucacsasu | | TACAAGTG | | ACAAGUG | | ACUUGUAC | | ACAAGUG | | ACUUGUAC | |
| | | | | | | AAAAATG | | AAAAAUG | | UUCACAU | | AAAAAUA | | UUCACAU | |
| NM_ | 1085- | csasuga(Ghd)AfaAfAfG | 3987 | VPusGfsauuCfuGfUfac | 4321 | CACATGAG | 4655 | CAUGAGA | 4989 | GGAUUCUG | 5323 | CAUGAGA | 5657 | UGAUUCUG | 5991 |
| 002973.3 | 1107 | fuacagaaucaL96 | | uuUfuCfucaugsusg | | AAAAGTAC | | AAAGUAC | | UACUUUUC | | AAAGUAC | | UACUUUUC | |
| | | | | | | AGAATCC | | AGAAUCC | | UCAUGUG | | AGAAUCA | | UCAUGUG | |
| NM_ | 1744- | csascuu(Chd)UfcAfCfA | 3988 | VPusAfsaucUfgAfAfgu | 4322 | TCCACTTCT | 4656 | CACUUCU | 4990 | AAAUCUGA | 5324 | CACUUCU | 5658 | UAAUCUGA | 5992 |
| 002973.3 | 1766 | fcuucagauuaL96 | | guGfaGfaagugsgsa | | CACACTTC | | CACACUU | | AGUGUGAG | | CACACUU | | AGUGUGAG | |
| | | | | | | AGATTT | | CAGAUUU | | AAGUGGA | | CAGAUUA | | AAGUGGA | |
| NM_ | 1745- | ascsuuc(Uhd)CfaCfAfCf | 3989 | VPusAfsaauCfuGfAfag | 4323 | CCACTTCT | 4657 | ACUUCUC | 4991 | GAAAUCUG | 5325 | ACUUCUC | 5659 | UAAAUCUG | 5993 |
| 002973.3 | 1767 | uucagauuuaL96 | | ugUfgAfgaagusgsg | | CACACTTC | | ACACUUC | | AAGUGUGA | | ACACUUC | | AAGUGUGA | |
| | | | | | | AGATTTC | | AGAUUUC | | GAAGUGG | | AGAUUUA | | GAAGUGG | |
| NM_ | 1746- | csusucu(Chd)AfcAfCfU | 3990 | VPusGfsaaaUfcUfGfaa | 4324 | CACTTCTC | 4658 | CUUCUCA | 4992 | UGAAAUCU | 5326 | CUUCUCA | 5660 | UGAAAUCU | 5994 |
| 002973.3 | 1768 | fucagauuucaL96 | | guGfuGfagaagsusg | | ACACTTCA | | CACUUCA | | GAAGUGUG | | CACUUCA | | GAAGUGUG | |
| | | | | | | GATTTCA | | GAUUUCA | | AGAAGUG | | GAUUUCA | | AGAAGUG | |
| NM_ | 1747- | ususcuc(Ahd)CfaCfUfU | 3991 | VPusUfsgaaAfuCfUfga | 4325 | ACTTCTCA | 4659 | UUCUCAC | 4993 | UUGAAAUC | 5327 | UUCUCAC | 5661 | UUGAAAUC | 5995 |
| 002973.3 | 1769 | fcagauuucaaL96 | | agUfgUfgagaasgsu | | CACTTCAG | | ACUUCAG | | UGAAGUGU | | ACUUCAG | | UGAAGUGU | |
| | | | | | | ATTTCAA | | AUUUCAA | | GAGAAGU | | AUUUCAA | | GAGAAGU | |
| NM_ | 1748- | uscsuca(Chd)AfcUfUfC | 3992 | VPusUfsugaAfaUfCfug | 4326 | CTTCTCAC | 4660 | UCUCACA | 4994 | GUUGAAAU | 5328 | UCUCACA | 5662 | UUUGAAAU | 5996 |
| 002973.3 | 1770 | fagauuucaaaL96 | | aaGfuGfugagasasg | | ACTTCAGA | | CUUCAGA | | CUGAAGUG | | CUUCAGA | | CUGAAGUG | |
| | | | | | | TTTCAAC | | UUUCAAC | | UGAGAAG | | UUUCAAA | | UGAGAAG | |
| NM_ | 1749- | csuscac(Ahd)CfuUfCfA | 3993 | VPusGfsuugAfaAfUfcu | 4327 | TTCTCACA | 4661 | CUCACAC | 4995 | GGUUGAAA | 5329 | CUCACAC | 5663 | UGUUGAAA | 5997 |
| 002973.3 | 1771 | fgauuucaacaL96 | | gaAfgUfgugagsasa | | CTTCAGAT | | UUCAGAU | | UCUGAAGU | | UUCAGAU | | UCUGAAGU | |
| | | | | | | TTCAACC | | UUCAACC | | GUGAGAA | | UUCAACA | | GUGAGAA | |
| NM_ | 1750- | uscsaca(Chd)UfuCfAfG | 3994 | VPusGfsguuGfaAfAfuc | 4328 | TCTCACAC | 4662 | UCACACU | 4996 | GGGUUGAA | 5330 | UCACACU | 5664 | UGGUUGAA | 5998 |
| 002973.3 | 1772 | fauuucaaccaL96 | | ugAfaGfugugasgsa | | TTCAGATT | | UCAGAUU | | AUCUGAAG | | UCAGAUU | | AUCUGAAG | |
| | | | | | | TCAACCC | | UCAACCC | | UGUGAGA | | UCAACCA | | UGUGAGA | |
| NM_ | 1751- | csascac(Uhd)UfcAfGfA | 3995 | VPusGfsgguUfgAfAfa | 4329 | CTCACACT | 4663 | CACACUU | 4997 | CGGGUUGA | 5331 | CACACUU | 5665 | UGGGUUGA | 5999 |
| 002973.3 | 1773 | fuuucaacccaL96 | | ucuGfaAfgugugsasg | | TCAGATTT | | CAGAUUU | | AAUCUGAA | | CAGAUUU | | AAUCUGAA | |
| | | | | | | CAACCCG | | CAACCCG | | GUGUGAG | | CAACCCA | | GUGUGAG | |
| NM_ | 1754- | ascsuuc(Ahd)GfaUfUfU | 3996 | VPusUfsucgGfgUfUfga | 4330 | ACACTTCA | 4664 | ACUUCAG | 4998 | AUUCGGGU | 5332 | ACUUCAG | 5666 | UUUCGGGU | 6000 |
| 002973.3 | 1776 | fcaacccgaaaL96 | | aaUfcUfgaagusgsu | | GATTTCAA | | AUUUCAA | | UGAAAUCU | | AUUUCAA | | UGAAAUCU | |
| | | | | | | CCCGAAT | | CCCGAAU | | GAAGUGU | | CCCGAAA | | GAAGUGU | |
| NM_ | 1781- | uscsaga(Chd)CfaAfAfG | 3997 | VPusUfsuaaCfuAfCfuc | 4331 | GTTCAGAC | 4665 | UCAGACC | 4999 | AUUAACUA | 5333 | UCAGACC | 5667 | UUUAACUA | 6001 |
| 002973.3 | 1803 | faguaguuaaaL96 | | uuUfgGfucugasasc | | CAAAGAGT | | AAAGAGU | | CUCUUUGG | | AAAGAGU | | CUCUUUGG | |
| | | | | | | AGTTAAT | | AGUUAAU | | UCUGAAC | | AGUUAAA | | UCUGAAC | |
| NM_ | 1782- | csasgac(Chd)AfaAfGfA | 3998 | VPusAfsuuaAfcUfAfcu | 4332 | TTCAGACC | 4666 | CAGACCA | 5000 | CAUUAACU | 5334 | CAGACCA | 5668 | UAUUAACU | 6002 |
| 002973.3 | 1804 | fguaguuaauaL96 | | cuUfuGfgucugsasa | | AAAGAGTA | | AAGAGUA | | ACUCUUUG | | AAGAGUA | | ACUCUUUG | |
| | | | | | | GTTAATG | | GUUAAUG | | GUCUGAA | | GUUAAUA | | GUCUGAA | |
| NM_ | 1984- | csuscua(Chd)UfaUfGfC | 3999 | VPusUfsgcgUfuUfAfg | 4333 | GTCTCTAC | 4667 | CUCUACU | 5001 | AUGCGUUU | 5335 | CUCUACU | 5669 | UUGCGUUU | 6003 |
| 002973.3 | 2006 | fcuaaacgcaaL96 | | gcaUfaGfuagagsasc | | TATGCCTA | | AUGCCUA | | AGGCAUAG | | AUGCCUA | | AGGCAUAG | |
| | | | | | | AACGCAT | | AACGCAU | | UAGAGAC | | AACGCAA | | UAGAGAC | |
| NM_ | 1985- | uscsuac(Uhd)AfuGfCfC | 4000 | VPusAfsugcGfuUfUfag | 4334 | TCTCTACT | 4668 | UCUACUA | 5002 | CAUGCGUU | 5336 | UCUACUA | 5670 | UAUGCGUU | 6004 |
| 002973.3 | 2007 | fuaaacgcauaL96 | | gcAfuAfguagasgsa | | ATGCCTAA | | UGCCUAA | | UAGGCAUA | | UGCCUAA | | UAGGCAUA | |
| | | | | | | ACGCATG | | ACGCAUG | | GUAGAGA | | ACGCAUA | | GUAGAGA | |
| NM_ | 1987- | usascua(Uhd)GfcCfUfA | 4001 | VPusAfscauGfcGfUfuu | 4335 | TCTACTAT | 4669 | UACUAUG | 5003 | GACAUGCG | 5337 | UACUAUG | 5671 | UACAUGCG | 6005 |
| 002973.3 | 2009 | faacgcauguaL96 | | agGfcAfuaguasgsa | | GCCTAAAC | | CCUAAAC | | UUUAGGCA | | CCUAAAC | | UUUAGGCA | |
| | | | | | | GCATGTC | | GCAUGUC | | UAGUAGA | | GCAUGUA | | UAGUAGA | |
| NM_ | 2592- | csusucu(Ghd)AfaUfCfU | 4002 | VPusUfsugaUfcCfAfua | 4336 | TACTTCTG | 4670 | CUUCUGA | 5004 | GUUGAUCC | 5338 | CUUCUGA | 5672 | UUUGAUCC | 6006 |
| 002973.3 | 2614 | fauggaucaaaL96 | | gaUfuCfagaagsusa | | AATCTATG | | AUCUAUG | | AUAGAUUC | | AUCUAUG | | AUAGAUUC | |
| | | | | | | GATCAAC | | GAUCAAC | | AGAAGUA | | GAUCAAA | | AGAAGUA | |
| NM_ | 2593- | ususcug(Ahd)AfuCfUfA | 4003 | VPusGfsuugAfuCfCfau | 4337 | ACTTCTGA | 4671 | UUCUGAA | 5005 | AGUUGAUC | 5339 | UUCUGAA | 5673 | UGUUGAUC | 6007 |
| 002973.3 | 2615 | fuggaucaacaL96 | | agAfuUfcagaasgsu | | ATCTATGG | | UCUAUGG | | CAUAGAUU | | UCUAUGG | | CAUAGAUU | |
| | | | | | | ATCAACT | | AUCAACU | | CAGAAGU | | AUCAACA | | CAGAAGU | |
| NM_ | 2594- | uscsuga(Ahd)UfcUfAfU | 4004 | VPusAfsguuGfaUfCfca | 4338 | CTTCTGAA | 4672 | UCUGAAU | 5006 | UAGUUGAU | 5340 | UCUGAAU | 5674 | UAGUUGAU | 6008 |
| 002973.3 | 2616 | fggaucaacuaL96 | | uaGfaUfucagasasg | | TCTATGGA | | CUAUGGA | | CCAUAGAU | | CUAUGGA | | CCAUAGAU | |
| | | | | | | TCAACTA | | UCAACUA | | UCAGAAG | | UCAACUA | | UCAGAAG | |
| NM_ | 2595- | csusgaa(Uhd)CfuAfUfG | 4005 | VPusUfsaguUfgAfUfcc | 4339 | TTCTGAAT | 4673 | CUGAAUC | 5007 | GUAGUUGA | 5341 | CUGAAUC | 5675 | UUAGUUGA | 6009 |
| 002973.3 | 2617 | fgaucaacuaaL96 | | auAfgAfuucagsasa | | CTATGGAT | | UAUGGAU | | UCCAUAGA | | UAUGGAU | | UCCAUAGA | |
| | | | | | | CAACTAC | | CAACUAC | | UUCAGAA | | CAACUAA | | UUCAGAA | |
| NM_ | 2596- | usgsaau(Chd)UfaUfGfG | 4006 | VPusGfsuagUfuGfAfuc | 4340 | TCTGAATC | 4674 | UGAAUCU | 5008 | AGUAGUUG | 5342 | UGAAUCU | 5676 | UGUAGUUG | 6010 |
| 002973.3 | 2618 | faucaacuacaL96 | | caUfaGfauucasgsa | | TATGGATC | | AUGGAUC | | AUCCAUAG | | AUGGAUC | | AUCCAUAG | |
| | | | | | | AACTACT | | AACUACU | | AUUCAGA | | AACUACA | | AUUCAGA | |
| NM_ | 2597- | gsasauc(Uhd)AfuGfGfA | 4007 | VPusAfsguaGfuUfGfau | 4341 | CTGAATCT | 4675 | GAAUCUA | 5009 | UAGUAGUU | 5343 | GAAUCUA | 5677 | UAGUAGUU | 6011 |
| 002973.3 | 2619 | fucaacuacuaL96 | | ccAfuAfgauucsasg | | ATGGATCA | | UGGAUCA | | GAUCCAUA | | UGGAUCA | | GAUCCAUA | |
| | | | | | | ACTACTA | | ACUACUA | | GAUUCAG | | ACUACUA | | GAUUCAG | |
| NM_ | 2598- | asasucu(Ahd)UfgGfAfU | 4008 | VPusUfsaguAfgUfUfga | 4342 | TGAATCTA | 4676 | AAUCUAU | 5010 | UUAGUAGU | 5344 | AAUCUAU | 5678 | UUAGUAGU | 6012 |
| 002973.3 | 2620 | fcaacuacuaaL96 | | ucCfaUfagauuscsa | | TGGATCAA | | GGAUCAA | | UGAUCCAU | | GGAUCAA | | UGAUCCAU | |
| | | | | | | CTACTAA | | CUACUAA | | AGAUUCA | | CUACUAA | | AGAUUCA | |
| NM_ | 2599- | asuscua(Uhd)GfgAfUfC | 4009 | VPusUfsuagUfaGfUfug | 4343 | GAATCTAT | 4677 | AUCUAUG | 5011 | UUUAGUAG | 5345 | AUCUAUG | 5679 | UUUAGUAG | 6013 |
| 002973.3 | 2621 | faacuacuaaaL96 | | auCfcAfuagaususc | | GGATCAAC | | GAUCAAC | | UUGAUCCA | | GAUCAAC | | UUGAUCCA | |
| | | | | | | TACTAAA | | UACUAAA | | UAGAUUC | | UACUAAA | | UAGAUUC | |
| NM_ | 3102- | usasuac(Chd)CfaAfUfA | 4010 | VPusCfsgucAfuAfGfgu | 4344 | TTTATACC | 4678 | UAUACCC | 5012 | GCGUCAUA | 5346 | UAUACCC | 5680 | UCGUCAUA | 6014 |
| 002973.3 | 3124 | fccuaugacgaL96 | | auUfgGfguauasasa | | CAATACCT | | AAUACCU | | GGUAUUGG | | AAUACCU | | GGUAUUGG | |
| | | | | | | ATGACGC | | AUGACGC | | GUAUAAA | | AUGACGA | | GUAUAAA | |
| NM_ | 3145- | gsascau(Ahd)UfaGfAfG | 4011 | VPusUfsuggUfaCfUfgc | 4345 | AAGACATA | 4679 | GACAUAU | 5013 | UUUGGUAC | 5347 | GACAUAU | 5681 | UUUGGUAC | 6015 |
| 002973.3 | 3167 | fcaguaccaaaL96 | | ucUfaUfaugucsusu | | TAGAGCAG | | AGAGCAG | | UGCUCUAU | | AGAGCAG | | UGCUCUAU | |
| | | | | | | TACCAAA | | UACCAAA | | AUGUCUU | | UACCAAA | | AUGUCUU | |
| NM_ | 3148- | asusaua(Ghd)AfgCfAfG | 4012 | VPusUfsauuUfgGfUfac | 4346 | ACATATAG | 4680 | AUAUAGA | 5014 | AUAUUUGG | 5348 | AUAUAGA | 5682 | UUAUUUGG | 6016 |
| 002973.3 | 3170 | fuaccaaauaaL96 | | ugCfuCfuauausgsu | | AGCAGTAC | | GCAGUAC | | UACUGCUC | | GCAGUAC | | UACUGCUC | |
| | | | | | | CAAATAT | | CAAAUAU | | UAUAUGU | | CAAAUAA | | UAUAUGU | |
| NM_ | 3149- | usasuag(Ahd)GfcAfGfU | 4013 | VPusAfsuauUfuGfGfua | 4347 | CATATAGA | 4681 | UAUAGAG | 5015 | CAUAUUUG | 5349 | UAUAGAG | 5683 | UAUAUUUG | 6017 |
| 002973.3 | 3171 | faccaaauauaL96 | | cuGfcUfcuauasusg | | GCAGTACC | | CAGUACC | | GUACUGCU | | CAGUACC | | GUACUGCU | |
| | | | | | | AAATATG | | AAAUAUG | | CUAUAUG | | AAAUAUA | | CUAUAUG | |
| NM_ | 3150- | asusaga(Ghd)CfaGfUfA | 4014 | VPusCfsauaUfuUfGfgu | 4348 | ATATAGAG | 4682 | AUAGAGC | 5016 | GCAUAUUU | 5350 | AUAGAGC | 5684 | UCAUAUUU | 6018 |
| 002973.3 | 3172 | fccaaauaugaL96 | | acUfgCfucuausasu | | CAGTACCA | | AGUACCA | | GGUACUGC | | AGUACCA | | GGUACUGC | |
| | | | | | | AATATGC | | AAUAUGC | | UCUAUAU | | AAUAUGA | | UCUAUAU | |
| NM_ | 3152- | asgsagc(Ahd)GfuAfCfC | 4015 | VPusGfsgcaUfaUfUfug | 4349 | ATAGAGCA | 4683 | AGAGCAG | 5017 | GGGCAUAU | 5351 | AGAGCAG | 5685 | UGGCAUAU | 6019 |
| 002973.3 | 3174 | faaauaugccaL96 | | guAfcUfgcucusasu | | GTACCAAA | | UACCAAA | | UUGGUACU | | UACCAAA | | UUGGUACU | |
| | | | | | | TATGCCC | | UAUGCCC | | GCUCUAU | | UAUGCCA | | GCUCUAU | |
| NM_ | 3479- | usgsucc(Chd)AfaAfUfU | 4016 | VPusUfsuguAfuGfGfu | 4350 | CATGTCCC | 4684 | UGUCCCA | 5018 | GUUGUAUG | 5352 | UGUCCCA | 5686 | UUUGUAUG | 6020 |
| 002973.3 | 3501 | faccauacaaaL96 | | aauUfuGfggacasusg | | AAATTACC | | AAUUACC | | GUAAUUUG | | AAUUACC | | GUAAUUUG | |
| | | | | | | ATACAAC | | AUACAAC | | GGACAUG | | AUACAAA | | GGACAUG | |
| NM_ | 3481- | uscscca(Ahd)AfuUfAfC | 4017 | VPusUfsguuGfuAfUfg | 4351 | TGTCCCAA | 4685 | UCCCAAA | 5019 | UUGUUGUA | 5353 | UCCCAAA | 5687 | UUGUUGUA | 6021 |
| 002973.3 | 3503 | fcauacaacaaL96 | | guaAfuUfugggascsa | | ATTACCAT | | UUACCAU | | UGGUAAUU | | UUACCAU | | UGGUAAUU | |
| | | | | | | ACAACAA | | ACAACAA | | UGGGACA | | ACAACAA | | UGGGACA | |
| NM_ | 3508- | asasgcc(Chd)UfuCfUfU | 4018 | VPusCfsaaaGfuAfGfaa | 4352 | ACAAGCCC | 4686 | AAGCCCU | 5020 | GCAAAGUA | 5354 | AAGCCCU | 5688 | UCAAAGUA | 6022 |
| 002973.3 | 3530 | fucuacuuugaL96 | | agAfaGfggcuusgsu | | TTCTTTCTA | | UCUUUCU | | GAAAGAAG | | UCUUUCU | | GAAAGAAG | |
| | | | | | | CTTTGC | | ACUUUGC | | GGCUUGU | | ACUUUGA | | GGCUUGU | |
| NM_ | 3511- | cscscuu(Chd)UfuUfCfU | 4019 | VPusUfsggcAfaAfGfua | 4353 | AGCCCTTC | 4687 | CCCUUCU | 5021 | AUGGCAAA | 5355 | CCCUUCU | 5689 | UUGGCAAA | 6023 |
| 002973.3 | 3533 | facuuugccaaL96 | | gaAfaGfaagggscsu | | TTTCTACTT | | UUCUACU | | GUAGAAAG | | UUCUACU | | GUAGAAAG | |
| | | | | | | TGCCAT | | UUGCCAU | | AAGGGCU | | UUGCCAA | | AAGGGCU | |
| NM_ | 3512- | cscsuuc(Uhd)UfuCfUfA | 4020 | VPusAfsuggCfaAfAfgu | 4354 | GCCCTTCTT | 4688 | CCUUCUU | 5022 | AAUGGCAA | 5356 | CCUUCUU | 5690 | UAUGGCAA | 6024 |
| 002973.3 | 3534 | fcuuugccauaL96 | | agAfaAfgaaggsgsc | | TCTACTTTG | | UCUACUU | | AGUAGAAA | | UCUACUU | | AGUAGAAA | |
| | | | | | | CCATT | | UGCCAUU | | GAAGGGC | | UGCCAUA | | GAAGGGC | |
| NM_ | 3513- | csusucu(Uhd)UfcUfAfC | 4021 | VPusAfsaugGfcAfAfag | 4355 | CCCTTCTTT | 4689 | CUUCUUU | 5023 | AAAUGGCA | 5357 | CUUCUUU | 5691 | UAAUGGCA | 6025 |
| 002973.3 | 3535 | fuuugccauuaL96 | | uaGfaAfagaagsgsg | | CTACTTTG | | CUACUUU | | AAGUAGAA | | CUACUUU | | AAGUAGAA | |
| | | | | | | CCATTT | | GCCAUUU | | AGAAGGG | | GCCAUUA | | AGAAGGG | |
| NM_ | 3514- | ususcuu(Uhd)CfuAfCfU | 4022 | VPusAfsaauGfgCfAfaa | 4356 | CCTTCTTTC | 4690 | UUCUUUC | 5024 | GAAAUGGC | 5358 | UUCUUUC | 5692 | UAAAUGGC | 6026 |
| 002973.3 | 3536 | fuugccauuuaL96 | | guAfgAfaagaasgsg | | TACTTTGC | | UACUUUG | | AAAGUAGA | | UACUUUG | | AAAGUAGA | |
| | | | | | | CATTTC | | CCAUUUC | | AAGAAGG | | CCAUUUA | | AAGAAGG | |
| NM_ | 3515- | uscsuuu(Chd)UfaCfUfU | 4023 | VPusGfsaaaUfgGfCfaa | 4357 | CTTCTTTCT | 4691 | UCUUUCU | 5025 | GGAAAUGG | 5359 | UCUUUCU | 5693 | UGAAAUGG | 6027 |
| 002973.3 | 3537 | fugccauuucaL96 | | agUfaGfaaagasasg | | ACTTTGCC | | ACUUUGC | | CAAAGUAG | | ACUUUGC | | CAAAGUAG | |
| | | | | | | ATTTCC | | CAUUUCC | | AAAGAAG | | CAUUUCA | | AAAGAAG | |
| NM_ | 3516- | csusuuc(Uhd)AfcUfUfU | 4024 | VPusGfsgaaAfuGfGfca | 4358 | TTCTTTCTA | 4692 | CUUUCUA | 5026 | UGGAAAUG | 5360 | CUUUCUA | 5694 | UGGAAAUG | 6028 |
| 002973.3 | 3538 | fgccauuuccaL96 | | aaGfuAfgaaagsasa | | CTTTGCCA | | CUUUGCC | | GCAAAGUA | | CUUUGCC | | GCAAAGUA | |
| | | | | | | TTTCCA | | AUUUCCA | | GAAAGAA | | AUUUCCA | | GAAAGAA | |
| NM_ | 3517- | ususucu(Ahd)CfuUfUfG | 4025 | VPusUfsggaAfaUfGfgc | 4359 | TCTTTCTAC | 4693 | UUUCUAC | 5027 | GUGGAAAU | 5361 | UUUCUAC | 5695 | UUGGAAAU | 6029 |
| 002973.3 | 3539 | fccauuuccaaL96 | | aaAfgUfagaaasgsa | | TTTGCCATT | | UUUGCCA | | GGCAAAGU | | UUUGCCA | | GGCAAAGU | |
| | | | | | | TCCAC | | UUUCCAC | | AGAAAGA | | UUUCCAA | | AGAAAGA | |
| NM_ | 3518- | ususcua(Chd)UfuUfGfC | 4026 | VPusGfsuggAfaAfUfg | 4360 | CTTTCTACT | 4694 | UUCUACU | 5028 | CGUGGAAA | 5362 | UUCUACU | 5696 | UGUGGAAA | 6030 |
| 002973.3 | 3540 | fcauuuccacaL96 | | gcaAfaGfuagaasasg | | TTGCCATTT | | UUGCCAU | | UGGCAAAG | | UUGCCAU | | UGGCAAAG | |
| | | | | | | CCACG | | UUCCACG | | UAGAAAG | | UUCCACA | | UAGAAAG | |
| NM_ | 3908- | csasugu(Ahd)CfaGfUfC | 4027 | VPusAfsccaUfuCfCfug | 4361 | CTCATGTA | 4695 | CAUGUAC | 5029 | AACCAUUC | 5363 | CAUGUAC | 5697 | UACCAUUC | 6031 |
| 002973.3 | 3930 | faggaaugguaL96 | | acUfgUfacaugsasg | | CAGTCAGG | | AGUCAGG | | CUGACUGU | | AGUCAGG | | CUGACUGU | |
| | | | | | | AATGGTT | | AAUGGUU | | ACAUGAG | | AAUGGUA | | ACAUGAG | |
| NM_ | 3909- | asusgua(Chd)AfgUfCfA | 4028 | VPusAfsaccAfuUfCfcu | 4362 | TCATGTAC | 4696 | AUGUACA | 5030 | GAACCAUU | 5364 | AUGUACA | 5698 | UAACCAUU | 6032 |
| 002973.3 | 3931 | fggaaugguuaL96 | | gaCfuGfuacausgsa | | AGTCAGGA | | GUCAGGA | | CCUGACUG | | GUCAGGA | | CCUGACUG | |
| | | | | | | ATGGTTC | | AUGGUUC | | UACAUGA | | AUGGUUA | | UACAUGA | |
| NM_ | 3910- | usgsuac(Ahd)GfuCfAfG | 4029 | VPusGfsaacCfaUfUfcc | 4363 | CATGTACA | 4697 | UGUACAG | 5031 | GGAACCAU | 5365 | UGUACAG | 5699 | UGAACCAU | 6033 |
| 002973.3 | 3932 | fgaaugguucaL96 | | ugAfcUfguacasusg | | GTCAGGAA | | UCAGGAA | | UCCUGACU | | UCAGGAA | | UCCUGACU | |
| | | | | | | TGGTTCC | | UGGUUCC | | GUACAUG | | UGGUUCA | | GUACAUG | |
| NM_ | 3918- | csasgga(Ahd)UfgGfUfU | 4030 | VPusAfsugaGfaAfGfga | 4364 | GTCAGGAA | 4698 | CAGGAAU | 5032 | GAUGAGAA | 5366 | CAGGAAU | 5700 | UAUGAGAA | 6034 |
| 002973.3 | 3940 | fccuucucauaL96 | | acCfaUfuccugsasc | | TGGTTCCTT | | GGUUCCU | | GGAACCAU | | GGUUCCU | | GGAACCAU | |
| | | | | | | CTCATC | | UCUCAUC | | UCCUGAC | | UCUCAUA | | UCCUGAC | |
| NM_ | 3921- | gsasaug(Ghd)UfuCfCfU | 4031 | VPusUfsggaUfgAfGfaa | 4365 | AGGAATGG | 4699 | GAAUGGU | 5033 | UUGGAUGA | 5367 | GAAUGGU | 5701 | UUGGAUGA | 6035 |
| 002973.3 | 3943 | fucucauccaaL96 | | ggAfaCfcauucscsu | | TTCCTTCTC | | UCCUUCU | | GAAGGAAC | | UCCUUCU | | GAAGGAAC | |
| | | | | | | ATCCAA | | CAUCCAA | | CAUUCCU | | CAUCCAA | | CAUUCCU | |
| NM_ | 3923- | asusggu(Uhd)CfcUfUfC | 4032 | VPusGfsuugGfaUfGfag | 4366 | GAATGGTT | 4700 | AUGGUUC | 5034 | AGUUGGAU | 5368 | AUGGUUC | 5702 | UGUUGGAU | 6036 |
| 002973.3 | 3945 | fucauccaacaL96 | | aaGfgAfaccaususc | | CCTTCTCAT | | CUUCUCA | | GAGAAGGA | | CUUCUCA | | GAGAAGGA | |
| | | | | | | CCAACT | | UCCAACU | | ACCAUUC | | UCCAACA | | ACCAUUC | |
| NM_ | 3924- | usgsguu(Chd)CfuUfCfU | 4033 | VPusAfsguuGfgAfUfg | 4367 | AATGGTTC | 4701 | UGGUUCC | 5035 | CAGUUGGA | 5369 | UGGUUCC | 5703 | UAGUUGGA | 6037 |
| 002973.3 | 3946 | fcauccaacuaL96 | | agaAfgGfaaccasusu | | CTTCTCATC | | UUCUCAU | | UGAGAAGG | | UUCUCAU | | UGAGAAGG | |
| | | | | | | CAACTG | | CCAACUG | | AACCAUU | | CCAACUA | | AACCAUU | |
| NM_ | 3926- | gsusucc(Uhd)UfcUfCfA | 4034 | VPusGfscagUfuGfGfau | 4368 | TGGTTCCTT | 4702 | GUUCCUU | 5036 | GGCAGUUG | 5370 | GUUCCUU | 5704 | UGCAGUUG | 6038 |
| 002973.3 | 3948 | fuccaacugcaL96 | | gaGfaAfggaacscsa | | CTCATCCA | | CUCAUCC | | GAUGAGAA | | CUCAUCC | | GAUGAGAA | |
| | | | | | | ACTGCC | | AACUGCC | | GGAACCA | | AACUGCA | | GGAACCA | |
| NM_ | 3947- | csasugc(Ghd)CfcAfAfU | 4035 | VPusAfsuuaGfcAfUfca | 4369 | CCCATGCG | 4703 | CAUGCGC | 5037 | CAUUAGCA | 5371 | CAUGCGC | 5705 | UAUUAGCA | 6039 |
| 002973.3 | 3969 | fgaugcuaauaL96 | | uuGfgCfgcaugsgsg | | CCAATGAT | | CAAUGAU | | UCAUUGGC | | CAAUGAU | | UCAUUGGC | |
| | | | | | | GCTAATG | | GCUAAUG | | GCAUGGG | | GCUAAUA | | GCAUGGG | |
| NM_ | 3950- | gscsgcc(Ahd)AfuGfAfU | 4036 | VPusGfsucaUfuAfGfca | 4370 | ATGCGCCA | 4704 | GCGCCAA | 5038 | CGUCAUUA | 5372 | GCGCCAA | 5706 | UGUCAUUA | 6040 |
| 002973.3 | 3972 | fgcuaaugacaL96 | | ucAfuUfggcgcsasu | | ATGATGCT | | UGAUGCU | | GCAUCAUU | | UGAUGCU | | GCAUCAUU | |
| | | | | | | AATGACG | | AAUGACG | | GGCGCAU | | AAUGACA | | GGCGCAU | |
| NM_ | 3952- | gscscaa(Uhd)GfaUfGfC | 4037 | VPusUfscguCfaUfUfag | 4371 | GCGCCAAT | 4705 | GCCAAUG | 5039 | GUCGUCAU | 5373 | GCCAAUG | 5707 | UUCGUCAU | 6041 |
| 002973.3 | 3974 | fuaaugacgaaL96 | | caUfcAfuuggcsgsc | | GATGCTAA | | AUGCUAA | | UAGCAUCA | | AUGCUAA | | UAGCAUCA | |
| | | | | | | TGACGAC | | UGACGAC | | UUGGCGC | | UGACGAA | | UUGGCGC | |
| NM_ | 3953- | cscsaau(Ghd)AfuGfCfU | 4038 | VPusGfsucgUfcAfUfua | 4372 | CGCCAATG | 4706 | CCAAUGA | 5040 | UGUCGUCA | 5374 | CCAAUGA | 5708 | UGUCGUCA | 6042 |
| 002973.3 | 3975 | faaugacgacaL96 | | gcAfuCfauuggscsg | | ATGCTAAT | | UGCUAAU | | UUAGCAUC | | UGCUAAU | | UUAGCAUC | |
| | | | | | | GACGACA | | GACGACA | | AUUGGCG | | GACGACA | | AUUGGCG | |
| NM_ | 3956- | asusgau(Ghd)CfuAfAfU | 4039 | VPusUfsgugUfcGfUfca | 4373 | CAATGATG | 4707 | AUGAUGC | 5041 | CUGUGUCG | 5375 | AUGAUGC | 5709 | UUGUGUCG | 6043 |
| 002973.3 | 3978 | fgacgacacaaL96 | | uuAfgCfaucaususg | | CTAATGAC | | UAAUGAC | | UCAUUAGC | | UAAUGAC | | UCAUUAGC | |
| | | | | | | GACACAG | | GACACAG | | AUCAUUG | | GACACAA | | AUCAUUG | |
| NM_ | 3957- | usgsaug(Chd)UfaAfUfG | 4040 | VPusCfsuguGfuCfGfuc | 4374 | AATGATGC | 4708 | UGAUGCU | 5042 | GCUGUGUC | 5376 | UGAUGCU | 5710 | UCUGUGUC | 6044 |
| 002973.3 | 3979 | facgacacagaL96 | | auUfaGfcaucasusu | | TAATGACG | | AAUGACG | | GUCAUUAG | | AAUGACG | | GUCAUUAG | |
| | | | | | | ACACAGC | | ACACAGC | | CAUCAUU | | ACACAGA | | CAUCAUU | |
| NM_ | 4003- | csgscuc(Ahd)AfaGfUfG | 4041 | VPusGfscugUfaGfUfgc | 4375 | CTCGCTCA | 4709 | CGCUCAA | 5043 | GGCUGUAG | 5377 | CGCUCAA | 5711 | UGCUGUAG | 6045 |
| 002973.3 | 4025 | fcacuacagcaL96 | | acUfuUfgagcgsasg | | AAGTGCAC | | AGUGCAC | | UGCACUUU | | AGUGCAC | | UGCACUUU | |
| | | | | | | TACAGCC | | UACAGCC | | GAGCGAG | | UACAGCA | | GAGCGAG | |
| NM_ | 4020- | asgsccc(Ahd)UfuCfCfA | 4042 | VPusUfsgucGfaGfAfcu | 4376 | ACAGCCCA | 4710 | AGCCCAU | 5044 | UUGUCGAG | 5378 | AGCCCAU | 5712 | UUGUCGAG | 6046 |
| 002973.3 | 4042 | fgucucgacaaL96 | | ggAfaUfgggcusgsu | | TTCCAGTC | | UCCAGUC | | ACUGGAAU | | UCCAGUC | | ACUGGAAU | |
| | | | | | | TCGACAA | | UCGACAA | | GGGCUGU | | UCGACAA | | GGGCUGU | |
| NM_ | 4022- | cscscau(Uhd)CfcAfGfU | 4043 | VPusGfsuugUfcGfAfga | 4377 | AGCCCATT | 4711 | CCCAUUC | 5045 | UGUUGUCG | 5379 | CCCAUUC | 5713 | UGUUGUCG | 6047 |
| 002973.3 | 4044 | fcucgacaacaL96 | | cuGfgAfaugggscsu | | CCAGTCTC | | CAGUCUC | | AGACUGGA | | CAGUCUC | | AGACUGGA | |
| | | | | | | GACAACA | | GACAACA | | AUGGGCU | | GACAACA | | AUGGGCU | |
| NM_ | 4082- | csascca(Chd)CfaAfCfA | 4044 | VPusUfsacaAfcUfGfcu | 4378 | CCCACCAC | 4712 | CACCACC | 5046 | UUACAACU | 5380 | CACCACC | 5714 | UUACAACU | 6048 |
| 002973.3 | 4104 | fgcaguuguaaL96 | | guUfgGfuggugsgsg | | CAACAGCA | | AACAGCA | | GCUGUUGG | | AACAGCA | | GCUGUUGG | |
| | | | | | | GTTGTAA | | GUUGUAA | | UGGUGGG | | GUUGUAA | | UGGUGGG | |
| NM_ | 4083- | ascscac(Chd)AfaCfAfG | 4045 | VPusUfsuacAfaCfUfgc | 4379 | CCACCACC | 4713 | ACCACCA | 5047 | CUUACAAC | 5381 | ACCACCA | 5715 | UUUACAAC | 6049 |
| 002973.3 | 4105 | fcaguuguaaaL96 | | ugUfuGfguggusgsg | | AACAGCAG | | ACAGCAG | | UGCUGUUG | | ACAGCAG | | UGCUGUUG | |
| | | | | | | TTGTAAG | | UUGUAAG | | GUGGUGG | | UUGUAAA | | GUGGUGG | |
| NM_ | 4084- | cscsacc(Ahd)AfcAfGfC | 4046 | VPusCfsuuaCfaAfCfug | 4380 | CACCACCA | 4714 | CCACCAA | 5048 | CCUUACAA | 5382 | CCACCAA | 5716 | UCUUACAA | 6050 |
| 002973.3 | 4106 | faguuguaagaL96 | | cuGfuUfgguggsusg | | ACAGCAGT | | CAGCAGU | | CUGCUGUU | | CAGCAGU | | CUGCUGUU | |
| | | | | | | TGTAAGG | | UGUAAGG | | GGUGGUG | | UGUAAGA | | GGUGGUG | |
| NM_ | 4086- | ascscaa(Chd)AfgCfAfG | 4047 | VPusGfsccuUfaCfAfac | 4381 | CCACCAAC | 4715 | ACCAACA | 5049 | AGCCUUAC | 5383 | ACCAACA | 5717 | UGCCUUAC | 6051 |
| 002973.3 | 4108 | fuuguaaggcaL96 | | ugCfuGfuuggusgsg | | AGCAGTTG | | GCAGUUG | | AACUGCUG | | GCAGUUG | | AACUGCUG | |
| | | | | | | TAAGGCT | | UAAGGCU | | UUGGUGG | | UAAGGCA | | UUGGUGG | |
| NM_ | 4088- | csasaca(Ghd)CfaGfUfU | 4048 | VPusCfsagcCfuUfAfca | 4382 | ACCAACAG | 4716 | CAACAGC | 5050 | GCAGCCUU | 5384 | CAACAGC | 5718 | UCAGCCUU | 6052 |
| 002973.3 | 4110 | fguaaggcugaL96 | | acUfgCfuguugsgsu | | CAGTTGTA | | AGUUGUA | | ACAACUGC | | AGUUGUA | | ACAACUGC | |
| | | | | | | AGGCTGC | | AGGCUGC | | UGUUGGU | | AGGCUGA | | UGUUGGU | |
| NM_ | 4143- | csusucu(Ahd)CfuGfCfU | 4049 | VPusGfsuugGfuAfGfaa | 4383 | CCCTTCTA | 4717 | CUUCUAC | 5051 | AGUUGGUA | 5385 | CUUCUAC | 5719 | UGUUGGUA | 6053 |
| 002973.3 | 4165 | fucuaccaacaL96 | | gcAfgUfagaagsgsg | | CTGCTTCT | | UGCUUCU | | GAAGCAGU | | UGCUUCU | | GAAGCAGU | |
| | | | | | | ACCAACT | | ACCAACU | | AGAAGGG | | ACCAACA | | AGAAGGG | |
| NM_ | 4145- | uscsuac(Uhd)GfcUfUfC | 4050 | VPusCfsaguUfgGfUfag | 4384 | CTTCTACT | 4718 | UCUACUG | 5052 | CCAGUUGG | 5386 | UCUACUG | 5720 | UCAGUUGG | 6054 |
| 002973.3 | 4167 | fuaccaacugaL96 | | aaGfcAfguagasasg | | GCTTCTAC | | CUUCUAC | | UAGAAGCA | | CUUCUAC | | UAGAAGCA | |
| | | | | | | CAACTGG | | CAACUGG | | GUAGAAG | | CAACUGA | | GUAGAAG | |
| NM_ | 4146- | csusacu(Ghd)CfuUfCfU | 4051 | VPusCfscagUfuGfGfua | 4385 | TTCTACTG | 4719 | CUACUGC | 5053 | UCCAGUUG | 5387 | CUACUGC | 5721 | UCCAGUUG | 6055 |
| 002973.3 | 4168 | faccaacuggaL96 | | gaAfgCfaguagsasa | | CTTCTACC | | UUCUACC | | GUAGAAGC | | UUCUACC | | GUAGAAGC | |
| | | | | | | AACTGGA | | AACUGGA | | AGUAGAA | | AACUGGA | | AGUAGAA | |
| NM_ | 4149- | csusgcu(Uhd)CfuAfCfC | 4052 | VPusCfsuucCfaGfUfug | 4386 | TACTGCTT | 4720 | CUGCUUC | 5054 | GCUUCCAG | 5388 | CUGCUUC | 5722 | UCUUCCAG | 6056 |
| 002973.3 | 4171 | faacuggaagaL96 | | guAfgAfagcagsusa | | CTACCAAC | | UACCAAC | | UUGGUAGA | | UACCAAC | | UUGGUAGA | |
| | | | | | | TGGAAGC | | UGGAAGC | | AGCAGUA | | UGGAAGA | | AGCAGUA | |
| NM_ | 4159- | csasacu(Ghd)GfaAfGfC | 4053 | VPusGfsuuuUfcUfGfu | 4387 | ACCAACTG | 4721 | CAACUGG | 5055 | AGUUUUCU | 5389 | CAACUGG | 5723 | UGUUUUCU | 6057 |
| 002973.3 | 4181 | facagaaaacaL96 | | gcuUfcCfaguugsgsu | | GAAGCACA | | AAGCACA | | GUGCUUCC | | AAGCACA | | GUGCUUCC | |
| | | | | | | GAAAACT | | GAAAACU | | AGUUGGU | | GAAAACA | | AGUUGGU | |
| NM_ | 4215- | ususgau(Uhd)UfcUfUfG | 4054 | VPusUfsggaUfgUfUfac | 4388 | TGTTGATTT | 4722 | UUGAUUU | 5056 | UUGGAUGU | 5390 | UUGAUUU | 5724 | UUGGAUGU | 6058 |
| 002973.3 | 4237 | fuaacauccaaL96 | | aaGfaAfaucaascsa | | CTTGTAAC | | CUUGUAA | | UACAAGAA | | CUUGUAA | | UACAAGAA | |
| | | | | | | ATCCAA | | CAUCCAA | | AUCAACA | | CAUCCAA | | AUCAACA | |
| NM_ | 4218- | asusuuc(Uhd)UfgUfAfA | 4055 | VPusUfsauuGfgAfUfg | 4389 | TGATTTCTT | 4723 | AUUUCUU | 5057 | CUAUUGGA | 5391 | AUUUCUU | 5725 | UUAUUGGA | 6059 |
| 002973.3 | 4240 | fcauccaauaaL96 | | uuaCfaAfgaaauscsa | | GTAACATC | | GUAACAU | | UGUUACAA | | GUAACAU | | UGUUACAA | |
| | | | | | | CAATAG | | CCAAUAG | | GAAAUCA | | CCAAUAA | | GAAAUCA | |
| NM_ | 4220- | ususcuu(Ghd)UfaAfCfA | 4056 | VPusCfscuaUfuGfGfau | 4390 | ATTTCTTGT | 4724 | UUCUUGU | 5058 | UCCUAUUG | 5392 | UUCUUGU | 5726 | UCCUAUUG | 6060 |
| 002973.3 | 4242 | fuccaauaggaL96 | | guUfaCfaagaasasu | | AACATCCA | | AACAUCC | | GAUGUUAC | | AACAUCC | | GAUGUUAC | |
| | | | | | | ATAGGA | | AAUAGGA | | AAGAAAU | | AAUAGGA | | AAGAAAU | |
| NM_ | 4221- | uscsuug(Uhd)AfaCfAfU | 4057 | VPusUfsccuAfuUfGfga | 4391 | TTTCTTGTA | 4725 | UCUUGUA | 5059 | UUCCUAUU | 5393 | UCUUGUA | 5727 | UUCCUAUU | 6061 |
| 002973.3 | 4243 | fccaauaggaaL96 | | ugUfuAfcaagasasa | | ACATCCAA | | ACAUCCA | | GGAUGUUA | | ACAUCCA | | GGAUGUUA | |
| | | | | | | TAGGAA | | AUAGGAA | | CAAGAAA | | AUAGGAA | | CAAGAAA | |
| NM_ | 4224- | usgsuaa(Chd)AfuCfCfA | 4058 | VPusCfsauuCfcUfAfuu | 4392 | CTTGTAAC | 4726 | UGUAACA | 5060 | GCAUUCCU | 5394 | UGUAACA | 5728 | UCAUUCCU | 6062 |
| 002973.3 | 4246 | fauaggaaugaL96 | | ggAfuGfuuacasasg | | ATCCAATA | | UCCAAUA | | AUUGGAUG | | UCCAAUA | | AUUGGAUG | |
| | | | | | | GGAATGC | | GGAAUGC | | UUACAAG | | GGAAUGA | | UUACAAG | |
| NM_ | 4226- | usasaca(Uhd)CfcAfAfU | 4059 | VPusAfsgcaUfuCfCfua | 4393 | TGTAACAT | 4727 | UAACAUC | 5061 | UAGCAUUC | 5395 | UAACAUC | 5729 | UAGCAUUC | 6063 |
| 002973.3 | 4248 | faggaaugcuaL96 | | uuGfgAfuguuascsa | | CCAATAGG | | CAAUAGG | | CUAUUGGA | | CAAUAGG | | CUAUUGGA | |
| | | | | | | AATGCTA | | AAUGCUA | | UGUUACA | | AAUGCUA | | UGUUACA | |
| NM_ | 4227- | asascau(Chd)CfaAfUfA | 4060 | VPusUfsagcAfuUfCfcu | 4394 | GTAACATC | 4728 | AACAUCC | 5062 | UUAGCAUU | 5396 | AACAUCC | 5730 | UUAGCAUU | 6064 |
| 002973.3 | 4249 | fggaaugcuaaL96 | | auUfgGfauguusasc | | CAATAGGA | | AAUAGGA | | CCUAUUGG | | AAUAGGA | | CCUAUUGG | |
| | | | | | | ATGCTAA | | AUGCUAA | | AUGUUAC | | AUGCUAA | | AUGUUAC | |
| NM_ | 4228- | ascsauc(Chd)AfaUfAfG | 4061 | VPusUfsuagCfaUfUfcc | 4395 | TAACATCC | 4729 | ACAUCCA | 5063 | GUUAGCAU | 5397 | ACAUCCA | 5731 | UUUAGCAU | 6065 |
| 002973.3 | 4250 | fgaaugcuaaaL96 | | uaUfuGfgaugususa | | AATAGGAA | | AUAGGAA | | UCCUAUUG | | AUAGGAA | | UCCUAUUG | |
| | | | | | | TGCTAAC | | UGCUAAC | | GAUGUUA | | UGCUAAA | | GAUGUUA | |
| NM_ | 4229- | csasucc(Ahd)AfuAfGfG | 4062 | VPusGfsuuaGfcAfUfuc | 4396 | AACATCCA | 4730 | CAUCCAA | 5064 | UGUUAGCA | 5398 | CAUCCAA | 5732 | UGUUAGCA | 6066 |
| 002973.3 | 4251 | faaugcuaacaL96 | | cuAfuUfggaugsusu | | ATAGGAAT | | UAGGAAU | | UUCCUAUU | | UAGGAAU | | UUCCUAUU | |
| | | | | | | GCTAACA | | GCUAACA | | GGAUGUU | | GCUAACA | | GGAUGUU | |
| NM_ | 4234- | asasuag(Ghd)AfaUfGfC | 4063 | VPusGfsaacUfgUfUfag | 4397 | CCAATAGG | 4731 | AAUAGGA | 5065 | UGAACUGU | 5399 | AAUAGGA | 5733 | UGAACUGU | 6067 |
| 002973.3 | 4256 | fuaacaguucaL96 | | caUfuCfcuauusgsg | | AATGCTAA | | AUGCUAA | | UAGCAUUC | | AUGCUAA | | UAGCAUUC | |
| | | | | | | CAGTTCA | | CAGUUCA | | CUAUUGG | | CAGUUCA | | CUAUUGG | |
| NM_ | 4235- | asusagg(Ahd)AfuGfCfU | 4064 | VPusUfsgaaCfuGfUfua | 4398 | CAATAGGA | 4732 | AUAGGAA | 5066 | GUGAACUG | 5400 | AUAGGAA | 5734 | UUGAACUG | 6068 |
| 002973.3 | 4257 | faacaguucaaL96 | | gcAfuUfccuaususg | | ATGCTAAC | | UGCUAAC | | UUAGCAUU | | UGCUAAC | | UUAGCAUU | |
| | | | | | | AGTTCAC | | AGUUCAC | | CCUAUUG | | AGUUCAA | | CCUAUUG | |
| NM_ | 4236- | usasgga(Ahd)UfgCfUfA | 4065 | VPusGfsugaAfcUfGfuu | 4399 | AATAGGAA | 4733 | UAGGAAU | 5067 | AGUGAACU | 5401 | UAGGAAU | 5735 | UGUGAACU | 6069 |
| 002973.3 | 4258 | facaguucacaL96 | | agCfaUfuccuasusu | | TGCTAACA | | GCUAACA | | GUUAGCAU | | GCUAACA | | GUUAGCAU | |
| | | | | | | GTTCACT | | GUUCACU | | UCCUAUU | | GUUCACA | | UCCUAUU | |
| NM_ | 4237- | asgsgaa(Uhd)GfcUfAfA | 4066 | VPusAfsgugAfaCfUfgu | 4400 | ATAGGAAT | 4734 | AGGAAUG | 5068 | AAGUGAAC | 5402 | AGGAAUG | 5736 | UAGUGAAC | 6070 |
| 002973.3 | 4259 | fcaguucacuaL96 | | uaGfcAfuuccusasu | | GCTAACAG | | CUAACAG | | UGUUAGCA | | CUAACAG | | UGUUAGCA | |
| | | | | | | TTCACTT | | UUCACUU | | UUCCUAU | | UUCACUA | | UUCCUAU | |
| NM_ | 4238- | gsgsaau(Ghd)CfuAfAfC | 4067 | VPusAfsaguGfaAfCfug | 4401 | TAGGAATG | 4735 | GGAAUGC | 5069 | CAAGUGAA | 5403 | GGAAUGC | 5737 | UAAGUGAA | 6071 |
| 002973.3 | 4260 | faguucacuuaL96 | | uuAfgCfauuccsusa | | CTAACAGT | | UAACAGU | | CUGUUAGC | | UAACAGU | | CUGUUAGC | |
| | | | | | | TCACTTG | | UCACUUG | | AUUCCUA | | UCACUUA | | AUUCCUA | |
| NM_ | 4239- | gsasaug(Chd)UfaAfCfA | 4068 | VPusCfsaagUfgAfAfcu | 4402 | AGGAATGC | 4736 | GAAUGCU | 5070 | GCAAGUGA | 5404 | GAAUGCU | 5738 | UCAAGUGA | 6072 |
| 002973.3 | 4261 | fguucacuugaL96 | | guUfaGfcauucscsu | | TAACAGTT | | AACAGUU | | ACUGUUAG | | AACAGUU | | ACUGUUAG | |
| | | | | | | CACTTGC | | CACUUGC | | CAUUCCU | | CACUUGA | | CAUUCCU | |
| NM_ | 4243- | gscsuaa(Chd)AfgUfUfC | 4069 | VPusAfscugCfaAfGfug | 4403 | ATGCTAAC | 4737 | GCUAACA | 5071 | CACUGCAA | 5405 | GCUAACA | 5739 | UACUGCAA | 6073 |
| 002973.3 | 4265 | facuugcaguaL96 | | aaCfuGfuuagcsasu | | AGTTCACT | | GUUCACU | | GUGAACUG | | GUUCACU | | GUGAACUG | |
| | | | | | | TGCAGTG | | UGCAGUG | | UUAGCAU | | UGCAGUA | | UUAGCAU | |
| NM_ | 4248- | csasguu(Chd)AfcUfUfG | 4070 | VPusCfsuucCfaCfUfgc | 4404 | AACAGTTC | 4738 | CAGUUCA | 5072 | UCUUCCAC | 5406 | CAGUUCA | 5740 | UCUUCCAC | 6074 |
| 002973.3 | 4270 | fcaguggaagaL96 | | aaGfuGfaacugsusu | | ACTTGCAG | | CUUGCAG | | UGCAAGUG | | CUUGCAG | | UGCAAGUG | |
| | | | | | | TGGAAGA | | UGGAAGA | | AACUGUU | | UGGAAGA | | AACUGUU | |
| NM_ | 4275- | gsasccg(Ahd)GfuAfGfA | 4071 | VPusCfsuaaAfuGfCfcu | 4405 | TGGACCGA | 4739 | GACCGAG | 5073 | CCUAAAUG | 5407 | GACCGAG | 5741 | UCUAAAUG | 6075 |
| 002973.3 | 4297 | fggcauuuagaL96 | | cuAfcUfcggucscsa | | GTAGAGGC | | UAGAGGC | | CCUCUACU | | UAGAGGC | | CCUCUACU | |
| | | | | | | ATTTAGG | | AUUUAGG | | CGGUCCA | | AUUUAGA | | CGGUCCA | |
| NM_ | 4276- | ascscga(Ghd)UfaGfAfG | 4072 | VPusCfscuaAfaUfGfcc | 4406 | GGACCGAG | 4740 | ACCGAGU | 5074 | UCCUAAAU | 5408 | ACCGAGU | 5742 | UCCUAAAU | 6076 |
| 002973.3 | 4298 | fgcauuuaggaL96 | | ucUfaCfucgguscsc | | TAGAGGCA | | AGAGGCA | | GCCUCUAC | | AGAGGCA | | GCCUCUAC | |
| | | | | | | TTTAGGA | | UUUAGGA | | UCGGUCC | | UUUAGGA | | UCGGUCC | |
| NM_ | 4304- | gsgscua(Uhd)UfcCfAfU | 4073 | VPusUfsaugGfaAfUfua | 4407 | GGGGCTAT | 4741 | GGCUAUU | 5075 | AUAUGGAA | 5409 | GGCUAUU | 5743 | UUAUGGAA | 6077 |
| 002973.3 | 4326 | faauuccauaaL96 | | ugGfaAfuagccscsc | | TCCATAAT | | CCAUAAU | | UUAUGGAA | | CCAUAAU | | UUAUGGAA | |
| | | | | | | TCCATAT | | UCCAUAU | | UAGCCCC | | UCCAUAA | | UAGCCCC | |
| NM_ | 4361- | usgsccg(Ahd)AfaCfUfG | 4074 | VPusAfsauaAfcUfUfcc | 4408 | CTTGCCGA | 4742 | UGCCGAA | 5076 | AAAUAACU | 5410 | UGCCGAA | 5744 | UAAUAACU | 6078 |
| 002973.3 | 4383 | fgaaguuauuaL96 | | agUfuUfcggcasasg | | AACTGGAA | | ACUGGAA | | UCCAGUUU | | ACUGGAA | | UCCAGUUU | |
| | | | | | | GTTATTT | | GUUAUUU | | CGGCAAG | | GUUAUUA | | CGGCAAG | |
| NM_ | 4363- | cscsgaa(Ahd)CfuGfGfA | 4075 | VPusUfsaaaUfaAfCfuu | 4409 | TGCCGAAA | 4743 | CCGAAAC | 5077 | AUAAAUAA | 5411 | CCGAAAC | 5745 | UUAAAUAA | 6079 |
| 002973.3 | 4385 | faguuauuuaaL96 | | ccAfgUfuucggscsa | | CTGGAAGT | | UGGAAGU | | CUUCCAGU | | UGGAAGU | | CUUCCAGU | |
| | | | | | | TATTTAT | | UAUUUAU | | UUCGGCA | | UAUUUAA | | UUCGGCA | |
| NM_ | 4364- | csgsaaa(Chd)UfgGfAfA | 4076 | VPusAfsuaaAfuAfAfcu | 4410 | GCCGAAAC | 4744 | CGAAACU | 5078 | AAUAAAUA | 5412 | CGAAACU | 5746 | UAUAAAUA | 6080 |
| 002973.3 | 4386 | fguuauuuauaL96 | | ucCfaGfuuucgsgsc | | TGGAAGTT | | GGAAGUU | | ACUUCCAG | | GGAAGUU | | ACUUCCAG | |
| | | | | | | ATTTATT | | AUUUAUU | | UUUCGGC | | AUUUAUA | | UUUCGGC | |
| NM_ | 4365- | gsasaac(Uhd)GfgAfAfG | 4077 | VPusAfsauaAfaUfAfac | 4411 | CCGAAACT | 4745 | GAAACUG | 5079 | AAAUAAAU | 5413 | GAAACUG | 5747 | UAAUAAAU | 6081 |
| 002973.3 | 4387 | fuuauuuauuaL96 | | uuCfcAfguuucsgsg | | GGAAGTTA | | GAAGUUA | | AACUUCCA | | GAAGUUA | | AACUUCCA | |
| | | | | | | TTTATTT | | UUUAUUU | | GUUUCGG | | UUUAUUA | | GUUUCGG | |
| NM_ | 4366- | asasacu(Ghd)GfaAfGfU | 4078 | VPusAfsaauAfaAfUfaa | 4412 | CGAAACTG | 4746 | AAACUGG | 5080 | AAAAUAAA | 5414 | AAACUGG | 5748 | UAAAUAAA | 6082 |
| 002973.3 | 4388 | fuauuuauuuaL96 | | cuUfcCfaguuuscsg | | GAAGTTAT | | AAGUUAU | | UAACUUCC | | AAGUUAU | | UAACUUCC | |
| | | | | | | TTATTTT | | UUAUUUU | | AGUUUCG | | UUAUUUA | | AGUUUCG | |
| NM_ | 4388- | usasaua(Ahd)CfcCfUfU | 4079 | VPusAfsugaCfuUfUfca | 4413 | TTTAATAA | 4747 | UAAUAAC | 5081 | CAUGACUU | 5415 | UAAUAAC | 5749 | UAUGACUU | 6083 |
| 002973.3 | 4410 | fgaaagucauaL96 | | agGfgUfuauuasasa | | CCCTTGAA | | CCUUGAA | | UCAAGGGU | | CCUUGAA | | UCAAGGGU | |
| | | | | | | AGTCATG | | AGUCAUG | | UAUUAAA | | AGUCAUA | | UAUUAAA | |
| NM_ | 4389- | asasuaa(Chd)CfcUfUfG | 4080 | VPusCfsaugAfcUfUfuc | 4414 | TTAATAAC | 4748 | AAUAACC | 5082 | UCAUGACU | 5416 | AAUAACC | 5750 | UCAUGACU | 6084 |
| 002973.3 | 4411 | faaagucaugaL96 | | aaGfgGfuuauusasa | | CCTTGAAA | | CUUGAAA | | UUCAAGGG | | CUUGAAA | | UUCAAGGG | |
| | | | | | | GTCATGA | | GUCAUGA | | UUAUUAA | | GUCAUGA | | UUAUUAA | |
| NM_ | 4392- | asasccc(Uhd)UfgAfAfA | 4081 | VPusGfsuucAfuGfAfcu | 4415 | ATAACCCT | 4749 | AACCCUU | 5083 | UGUUCAUG | 5417 | AACCCUU | 5751 | UGUUCAUG | 6085 |
| 002973.3 | 4414 | fgucaugaacaL96 | | uuCfaAfggguusasu | | TGAAAGTC | | GAAAGUC | | ACUUUCAA | | GAAAGUC | | ACUUUCAA | |
| | | | | | | ATGAACA | | AUGAACA | | GGGUUAU | | AUGAACA | | GGGUUAU | |
| NM_ | 4396- | csusuga(Ahd)AfgUfCfA | 4082 | VPusAfsuguGfuUfCfau | 4416 | CCCTTGAA | 4750 | CUUGAAA | 5084 | GAUGUGUU | 5418 | CUUGAAA | 5752 | UAUGUGUU | 6086 |
| 002973.3 | 4418 | fugaacacauaL96 | | gaCfuUfucaagsgsg | | AGTCATGA | | GUCAUGA | | CAUGACUU | | GUCAUGA | | CAUGACUU | |
| | | | | | | ACACATC | | ACACAUC | | UCAAGGG | | ACACAUA | | UCAAGGG | |
| NM_ | 4402- | asgsuca(Uhd)GfaAfCfA | 4083 | VPusUfsagcUfgAfUfgu | 4417 | AAAGTCAT | 4751 | AGUCAUG | 5085 | CUAGCUGA | 5419 | AGUCAUG | 5753 | UUAGCUGA | 6087 |
| 002973.3 | 4424 | fcaucagcuaaL96 | | guUfcAfugacususu | | GAACACAT | | AACACAU | | UGUGUUCA | | AACACAU | | UGUGUUCA | |
| | | | | | | CAGCTAG | | CAGCUAG | | UGACUUU | | CAGCUAA | | UGACUUU | |
| NM_ | 4403- | gsuscau(Ghd)AfaCfAfC | 4084 | VPusCfsuagCfuGfAfug | 4418 | AAGTCATG | 4752 | GUCAUGA | 5086 | GCUAGCUG | 5420 | GUCAUGA | 5754 | UCUAGCUG | 6088 |
| 002973.3 | 4425 | faucagcuagaL96 | | ugUfuCfaugacsusu | | AACACATC | | ACACAUC | | AUGUGUUC | | ACACAUC | | AUGUGUUC | |
| | | | | | | AGCTAGC | | AGCUAGC | | AUGACUU | | AGCUAGA | | AUGACUU | |
| NM_ | 4404- | uscsaug(Ahd)AfcAfCfA | 4085 | VPusGfscuaGfcUfGfau | 4419 | AGTCATGA | 4753 | UCAUGAA | 5087 | UGCUAGCU | 5421 | UCAUGAA | 5755 | UGCUAGCU | 6089 |
| 002973.3 | 4426 | fucagcuagcaL96 | | guGfuUfcaugascsu | | ACACATCA | | CACAUCA | | GAUGUGUU | | CACAUCA | | GAUGUGUU | |
| | | | | | | GCTAGCA | | GCUAGCA | | CAUGACU | | GCUAGCA | | CAUGACU | |
| NM_ | 4405- | csasuga(Ahd)CfaCfAfU | 4086 | VPusUfsgcuAfgCfUfga | 4420 | GTCATGAA | 4754 | CAUGAAC | 5088 | UUGCUAGC | 5422 | CAUGAAC | 5756 | UUGCUAGC | 6090 |
| 002973.3 | 4427 | fcagcuagcaaL96 | | ugUfgUfucaugsasc | | CACATCAG | | ACAUCAG | | UGAUGUGU | | ACAUCAG | | UGAUGUGU | |
| | | | | | | CTAGCAA | | CUAGCAA | | UCAUGAC | | CUAGCAA | | UCAUGAC | |
| NM_ | 4405- | csasuga(Ahd)CfaCfAfU | 4087 | VPusUfsgcuAfgCfUfga | 4421 | GTCATGAA | 4755 | CAUGAAC | 5089 | UUGCUAGC | 5423 | CAUGAAC | 5757 | UUGCUAGC | 6091 |
| 002973.3 | 4427 | fcagcuagcaaL96 | | ugUfgUfucaugsasc | | CACATCAG | | ACAUCAG | | UGAUGUGU | | ACAUCAG | | UGAUGUGU | |
| | | | | | | CTAGCAA | | CUAGCAA | | UCAUGAC | | CUAGCAA | | UCAUGAC | |
| NM_ | 4406- | asusgaa(Chd)AfcAfUfC | 4088 | VPusUfsugcUfaGfCfug | 4422 | TCATGAAC | 4756 | AUGAACA | 5090 | UUUGCUAG | 5424 | AUGAACA | 5758 | UUUGCUAG | 6092 |
| 002973.3 | 4428 | fagcuagcaaaL96 | | auGfuGfuucausgsa | | ACATCAGC | | CAUCAGC | | CUGAUGUG | | CAUCAGC | | CUGAUGUG | |
| | | | | | | TAGCAAA | | UAGCAAA | | UUCAUGA | | UAGCAAA | | UUCAUGA | |
| NM_ | 4407- | usgsaac(Ahd)CfaUfCfA | 4089 | VPusUfsuugCfuAfGfcu | 4423 | CATGAACA | 4757 | UGAACAC | 5091 | UUUUGCUA | 5425 | UGAACAC | 5759 | UUUUGCUA | 6093 |
| 002973.3 | 4429 | fgcuagcaaaaL96 | | gaUfgUfguucasusg | | CATCAGCT | | AUCAGCU | | GCUGAUGU | | AUCAGCU | | GCUGAUGU | |
| | | | | | | AGCAAAA | | AGCAAAA | | GUUCAUG | | AGCAAAA | | GUUCAUG | |
| NM_ | 4408- | gsasaca(Chd)AfuCfAfG | 4090 | VPusUfsuuuGfcUfAfgc | 4424 | ATGAACAC | 4758 | GAACACA | 5092 | CUUUUGCU | 5426 | GAACACA | 5760 | UUUUUGCU | 6094 |
| 002973.3 | 4430 | fcuagcaaaaaL96 | | ugAfuGfuguucsasu | | ATCAGCTA | | UCAGCUA | | AGCUGAUG | | UCAGCUA | | AGCUGAUG | |
| | | | | | | GCAAAAG | | GCAAAAG | | UGUUCAU | | GCAAAAA | | UGUUCAU | |
| NM_ | 4409- | asascac(Ahd)UfcAfGfC | 4091 | VPusCfsuuuUfgCfUfag | 4425 | TGAACACA | 4759 | AACACAU | 5093 | UCUUUUGC | 5427 | AACACAU | 5761 | UCUUUUGC | 6095 |
| 002973.3 | 4431 | fuagcaaaagaL96 | | cuGfaUfguguuscsa | | TCAGCTAG | | CAGCUAG | | UAGCUGAU | | CAGCUAG | | UAGCUGAU | |
| | | | | | | CAAAAGA | | CAAAAGA | | GUGUUCA | | CAAAAGA | | GUGUUCA | |
| NM_ | 4413- | csasuca(Ghd)CfuAfGfC | 4092 | VPusAfscuuCfuUfUfug | 4426 | CACATCAG | 4760 | CAUCAGC | 5094 | UACUUCUU | 5428 | CAUCAGC | 5762 | UACUUCUU | 6096 |
| 002973.3 | 4435 | faaaagaaguaL96 | | cuAfgCfugaugsusg | | CTAGCAAA | | UAGCAAA | | UUGCUAGC | | UAGCAAA | | UUGCUAGC | |
| | | | | | | AGAAGTA | | AGAAGUA | | UGAUGUG | | AGAAGUA | | UGAUGUG | |
| NM_ | 4419- | csusagc(Ahd)AfaAfGfA | 4093 | VPusCfsuugUfuAfCfuu | 4427 | AGCTAGCA | 4761 | CUAGCAA | 5095 | UCUUGUUA | 5429 | CUAGCAA | 5763 | UCUUGUUA | 6097 |
| 002973.3 | 4441 | faguaacaagaL96 | | cuUfuUfgcuagscsu | | AAAGAAGT | | AAGAAGU | | CUUCUUUU | | AAGAAGU | | CUUCUUUU | |
| | | | | | | AACAAGA | | AACAAGA | | GCUAGCU | | AACAAGA | | GCUAGCU | |
| NM_ | 4431- | gsusaac(Ahd)AfgAfGfU | 4094 | VPusGfscaaGfaAfUfca | 4428 | AAGTAACA | 4762 | GUAACAA | 5096 | AGCAAGAA | 5430 | GUAACAA | 5764 | UGCAAGAA | 6098 |
| 002973.3 | 4453 | fgauucuugcaL96 | | cuCfuUfguuacsusu | | AGAGTGAT | | GAGUGAU | | UCACUCUU | | GAGUGAU | | UCACUCUU | |
| | | | | | | TCTTGCT | | UCUUGCU | | GUUACUU | | UCUUGCA | | GUUACUU | |
| NM_ | 4432- | usasaca(Ahd)GfaGfUfG | 4095 | VPusAfsgcaAfgAfAfuc | 4429 | AGTAACAA | 4763 | UAACAAG | 5097 | CAGCAAGA | 5431 | UAACAAG | 5765 | UAGCAAGA | 6099 |
| 002973.3 | 4454 | fauucuugcuaL96 | | acUfcUfuguuascsu | | GAGTGATT | | AGUGAUU | | AUCACUCU | | AGUGAUU | | AUCACUCU | |
| | | | | | | CTTGCTG | | CUUGCUG | | UGUUACU | | CUUGCUA | | UGUUACU | |
| NM_ | 4433- | asascaa(Ghd)AfgUfGfA | 4096 | VPusCfsagcAfaGfAfau | 4430 | GTAACAAG | 4764 | AACAAGA | 5098 | GCAGCAAG | 5432 | AACAAGA | 5766 | UCAGCAAG | 6100 |
| 002973.3 | 4455 | fuucuugcugaL96 | | caCfuCfuuguusasc | | AGTGATTC | | GUGAUUC | | AAUCACUC | | GUGAUUC | | AAUCACUC | |
| | | | | | | TTGCTGC | | UUGCUGC | | UUGUUAC | | UUGCUGA | | UUGUUAC | |
| NM_ | 4437- | asgsagu(Ghd)AfuUfCfU | 4097 | VPusAfsuagCfaGfCfaa | 4431 | CAAGAGTG | 4765 | AGAGUGA | 5099 | AAUAGCAG | 5433 | AGAGUGA | 5767 | UAUAGCAG | 6101 |
| 002973.3 | 4459 | fugcugcuauaL96 | | gaAfuCfacucususg | | ATTCTTGCT | | UUCUUGC | | CAAGAAUC | | UUCUUGC | | CAAGAAUC | |
| | | | | | | GCTATT | | UGCUAUU | | ACUCUUG | | UGCUAUA | | ACUCUUG | |
| NM_ | 4438- | gsasgug(Ahd)UfuCfUfU | 4098 | VPusAfsauaGfcAfGfca | 4432 | AAGAGTGA | 4766 | GAGUGAU | 5100 | UAAUAGCA | 5434 | GAGUGAU | 5768 | UAAUAGCA | 6102 |
| 002973.3 | 4460 | fgcugcuauuaL96 | | agAfaUfcacucsusu | | TTCTTGCTG | | UCUUGCU | | GCAAGAAU | | UCUUGCU | | GCAAGAAU | |
| | | | | | | CTATTA | | GCUAUUA | | CACUCUU | | GCUAUUA | | CACUCUU | |
| NM_ | 4440- | gsusgau(Uhd)CfuUfGfC | 4099 | VPusGfsuaaUfaGfCfag | 4433 | GAGTGATT | 4767 | GUGAUUC | 5101 | AGUAAUAG | 5435 | GUGAUUC | 5769 | UGUAAUAG | 6103 |
| 002973.3 | 4462 | fugcuauuacaL96 | | caAfgAfaucacsusc | | CTTGCTGC | | UUGCUGC | | CAGCAAGA | | UUGCUGC | | CAGCAAGA | |
| | | | | | | TATTACT | | UAUUACU | | AUCACUC | | UAUUACA | | AUCACUC | |
| NM_ | 4492- | ususgga(Ahd)CfgCfCfC | 4100 | VPusUfsuagUfaAfAfag | 4434 | ACTTGGAA | 4768 | UUGGAAC | 5102 | UUUAGUAA | 5436 | UUGGAAC | 5770 | UUUAGUAA | 6104 |
| 002973.3 | 4514 | fuuuuacuaaaL96 | | ggCfgUfuccaasgsu | | CGCCCTTTT | | GCCCUUU | | AAGGGCGU | | GCCCUUU | | AAGGGCGU | |
| | | | | | | ACTAAA | | UACUAAA | | UCCAAGU | | UACUAAA | | UCCAAGU | |
| NM_ | 4493- | usgsgaa(Chd)GfcCfCfU | 4101 | VPusUfsuuaGfuAfAfaa | 4435 | CTTGGAAC | 4769 | UGGAACG | 5103 | GUUUAGUA | 5437 | UGGAACG | 5771 | UUUUAGUA | 6105 |
| 002973.3 | 4515 | fuuuacuaaaaL96 | | ggGfcGfuuccasasg | | GCCCTTTT | | CCCUUUU | | AAAGGGCG | | CCCUUUU | | AAAGGGCG | |
| | | | | | | ACTAAAC | | ACUAAAC | | UUCCAAG | | ACUAAAA | | UUCCAAG | |
| NM_ | 4495- | gsasacg(Chd)CfcUfUfU | 4102 | VPusAfsguuUfaGfUfaa | 4436 | TGGAACGC | 4770 | GAACGCC | 5104 | AAGUUUAG | 5438 | GAACGCC | 5772 | UAGUUUAG | 6106 |
| 002973.3 | 4517 | fuacuaaacuaL96 | | aaGfgGfcguucscsa | | CCTTTTACT | | CUUUUAC | | UAAAAGGG | | CUUUUAC | | UAAAAGGG | |
| | | | | | | AAACTT | | UAAACUU | | CGUUCCA | | UAAACUA | | CGUUCCA | |
| NM_ | 4496- | asascgc(Chd)CfuUfUfU | 4103 | VPusAfsaguUfuAfGfua | 4437 | GGAACGCC | 4771 | AACGCCC | 5105 | CAAGUUUA | 5439 | AACGCCC | 5773 | UAAGUUUA | 6107 |
| 002973.3 | 4518 | facuaaacuuaL96 | | aaAfgGfgcguuscsc | | CTTTTACTA | | UUUUACU | | GUAAAAGG | | UUUUACU | | GUAAAAGG | |
| | | | | | | AACTTG | | AAACUUG | | GCGUUCC | | AAACUUA | | GCGUUCC | |
| NM_ | 4497- | ascsgcc(Chd)UfuUfUfA | 4104 | VPusCfsaagUfuUfAfgu | 4438 | GAACGCCC | 4772 | ACGCCCU | 5106 | UCAAGUUU | 5440 | ACGCCCU | 5774 | UCAAGUUU | 6108 |
| 002973.3 | 4519 | fcuaaacuugaL96 | | aaAfaGfggcgususc | | TTTTACTA | | UUUACUA | | AGUAAAAG | | UUUACUA | | AGUAAAAG | |
| | | | | | | AACTTGA | | AACUUGA | | GGCGUUC | | AACUUGA | | GGCGUUC | |
| NM_ | 4498- | csgsccc(Uhd)UfuUfAfC | 4105 | VPusUfscaaGfuUfUfag | 4439 | AACGCCCT | 4773 | CGCCCUU | 5107 | GUCAAGUU | 5441 | CGCCCUU | 5775 | UUCAAGUU | 6109 |
| 002973.3 | 4520 | fuaaacuugaaL96 | | uaAfaAfgggcgsusu | | TTTACTAA | | UUACUAA | | UAGUAAAA | | UUACUAA | | UAGUAAAA | |
| | | | | | | ACTTGAC | | ACUUGAC | | GGGCGUU | | ACUUGAA | | GGGCGUU | |
| NM_ | 4522- | gsusuuc(Ahd)GfuAfAfA | 4106 | VPusCfsgguAfaGfAfau | 4440 | AAGTTTCA | 4774 | GUUUCAG | 5108 | ACGGUAAG | 5442 | GUUUCAG | 5776 | UCGGUAAG | 6110 |
| 002973.3 | 4544 | fuucuuaccgaL96 | | uuAfcUfgaaacsusu | | GTAAATTC | | UAAAUUC | | AAUUUACU | | UAAAUUC | | AAUUUACU | |
| | | | | | | TTACCGT | | UUACCGU | | GAAACUU | | UUACCGA | | GAAACUU | |
| NM_ | 4523- | ususuca(Ghd)UfaAfAfU | 4107 | VPusAfscggUfaAfGfaa | 4441 | AGTTTCAG | 4775 | UUUCAGU | 5109 | GACGGUAA | 5443 | UUUCAGU | 5777 | UACGGUAA | 6111 |
| 002973.3 | 4545 | fucuuaccguaL96 | | uuUfaCfugaaascsu | | TAAATTCT | | AAAUUCU | | GAAUUUAC | | AAAUUCU | | GAAUUUAC | |
| | | | | | | TACCGTC | | UACCGUC | | UGAAACU | | UACCGUA | | UGAAACU | |
| NM_ | 4524- | ususcag(Uhd)AfaAfUfU | 4108 | VPusGfsacgGfuAfAfga | 4442 | GTTTCAGT | 4776 | UUCAGUA | 5110 | UGACGGUA | 5444 | UUCAGUA | 5778 | UGACGGUA | 6112 |
| 002973.3 | 4546 | fcuuaccgucaL96 | | auUfuAfcugaasasc | | AAATTCTT | | AAUUCUU | | AGAAUUUA | | AAUUCUU | | AGAAUUUA | |
| | | | | | | ACCGTCA | | ACCGUCA | | CUGAAAC | | ACCGUCA | | CUGAAAC | |
| NM_ | 4525- | uscsagu(Ahd)AfaUfUfC | 4109 | VPusUfsgacGfgUfAfag | 4443 | TTTCAGTA | 4777 | UCAGUAA | 5111 | UUGACGGU | 5445 | UCAGUAA | 5779 | UUGACGGU | 6113 |
| 002973.3 | 4547 | fuuaccgucaaL96 | | aaUfuUfacugasasa | | AATTCTTA | | AUUCUUA | | AAGAAUUU | | AUUCUUA | | AAGAAUUU | |
| | | | | | | CCGTCAA | | CCGUCAA | | ACUGAAA | | CCGUCAA | | ACUGAAA | |
| NM_ | 4526- | csasgua(Ahd)AfuUfCfU | 4110 | VPusUfsugaCfgGfUfaa | 4444 | TTCAGTAA | 4778 | CAGUAAA | 5112 | UUUGACGG | 5446 | CAGUAAA | 5780 | UUUGACGG | 6114 |
| 002973.3 | 4548 | fuaccgucaaaL96 | | gaAfuUfuacugsasa | | ATTCTTAC | | UUCUUAC | | UAAGAAUU | | UUCUUAC | | UAAGAAUU | |
| | | | | | | CGTCAAA | | CGUCAAA | | UACUGAA | | CGUCAAA | | UACUGAA | |
| NM_ | 4527- | asgsuaa(Ahd)UfuCfUfU | 4111 | VPusUfsuugAfcGfGfua | 4445 | TCAGTAAA | 4779 | AGUAAAU | 5113 | GUUUGACG | 5447 | AGUAAAU | 5781 | UUUUGACG | 6115 |
| 002973.3 | 4549 | faccgucaaaaL96 | | agAfaUfuuacusgsa | | TTCTTACC | | UCUUACC | | GUAAGAAU | | UCUUACC | | GUAAGAAU | |
| | | | | | | GTCAAAC | | GUCAAAC | | UUACUGA | | GUCAAAA | | UUACUGA | |
| NM_ | 4528- | gsusaaa(Uhd)UfcUfUfA | 4112 | VPusGfsuuuGfaCfGfgu | 4446 | CAGTAAAT | 4780 | GUAAAUU | 5114 | AGUUUGAC | 5448 | GUAAAUU | 5782 | UGUUUGAC | 6116 |
| 002973.3 | 4550 | fccgucaaacaL96 | | aaGfaAfuuuacsusg | | TCTTACCG | | CUUACCG | | GGUAAGAA | | CUUACCG | | GGUAAGAA | |
| | | | | | | TCAAACT | | UCAAACU | | UUUACUG | | UCAAACA | | UUUACUG | |
| NM_ | 4529- | usasaau(Uhd)CfuUfAfC | 4113 | VPusAfsguuUfgAfCfg | 4447 | AGTAAATT | 4781 | UAAAUUC | 5115 | CAGUUUGA | 5449 | UAAAUUC | 5783 | UAGUUUGA | 6117 |
| 002973.3 | 4551 | fcgucaaacuaL96 | | guaAfgAfauuuascsu | | CTTACCGT | | UUACCGU | | CGGUAAGA | | UUACCGU | | CGGUAAGA | |
| | | | | | | CAAACTG | | CAAACUG | | AUUUACU | | CAAACUA | | AUUUACU | |
| NM_ | 4530- | asasauu(Chd)UfuAfCfC | 4114 | VPusCfsaguUfuGfAfcg | 4448 | GTAAATTC | 4782 | AAAUUCU | 5116 | UCAGUUUG | 5450 | AAAUUCU | 5784 | UCAGUUUG | 6118 |
| 002973.3 | 4552 | fgucaaacugaL96 | | guAfaGfaauuusasc | | TTACCGTC | | UACCGUC | | ACGGUAAG | | UACCGUC | | ACGGUAAG | |
| | | | | | | AAACTGA | | AAACUGA | | AAUUUAC | | AAACUGA | | AAUUUAC | |
| NM_ | 4531- | asasuuc(Uhd)UfaCfCfG | 4115 | VPusUfscagUfuUfGfac | 4449 | TAAATTCT | 4783 | AAUUCUU | 5117 | GUCAGUUU | 5451 | AAUUCUU | 5785 | UUCAGUUU | 6119 |
| 002973.3 | 4553 | fucaaacugaaL96 | | ggUfaAfgaauususa | | TACCGTCA | | ACCGUCA | | GACGGUAA | | ACCGUCA | | GACGGUAA | |
| | | | | | | AACTGAC | | AACUGAC | | GAAUUUA | | AACUGAA | | GAAUUUA | |
| NM_ | 4532- | asusucu(Uhd)AfcCfGfU | 4116 | VPusGfsucaGfuUfUfga | 4450 | AAATTCTT | 4784 | AUUCUUA | 5118 | CGUCAGUU | 5452 | AUUCUUA | 5786 | UGUCAGUU | 6120 |
| 002973.3 | 4554 | fcaaacugacaL96 | | cgGfuAfagaaususu | | ACCGTCAA | | CCGUCAA | | UGACGGUA | | CCGUCAA | | UGACGGUA | |
| | | | | | | ACTGACG | | ACUGACG | | AGAAUUU | | ACUGACA | | AGAAUUU | |
| NM_ | 4533- | ususcuu(Ahd)CfcGfUfC | 4117 | VPusCfsgucAfgUfUfug | 4451 | AATTCTTA | 4785 | UUCUUAC | 5119 | CCGUCAGU | 5453 | UUCUUAC | 5787 | UCGUCAGU | 6121 |
| 002973.3 | 4555 | faaacugacgaL96 | | acGfgUfaagaasusu | | CCGTCAAA | | CGUCAAA | | UUGACGGU | | CGUCAAA | | UUGACGGU | |
| | | | | | | CTGACGG | | CUGACGG | | AAGAAUU | | CUGACGA | | AAGAAUU | |
| NM_ | 4534- | uscsuua(Chd)CfgUfCfA | 4118 | VPusCfscguCfaGfUfuu | 4452 | ATTCTTAC | 4786 | UCUUACC | 5120 | UCCGUCAG | 5454 | UCUUACC | 5788 | UCCGUCAG | 6122 |
| 002973.3 | 4556 | faacugacggaL96 | | gaCfgGfuaagasasu | | CGTCAAAC | | GUCAAAC | | UUUGACGG | | GUCAAAC | | UUUGACGG | |
| | | | | | | TGACGGA | | UGACGGA | | UAAGAAU | | UGACGGA | | UAAGAAU | |
| NM_ | 4535- | csusuac(Chd)GfuCfAfA | 4119 | VPusUfsccgUfcAfGfuu | 4453 | TTCTTACC | 4787 | CUUACCG | 5121 | AUCCGUCA | 5455 | CUUACCG | 5789 | UUCCGUCA | 6123 |
| 002973.3 | 4557 | facugacggaaL96 | | ugAfcGfguaagsasa | | GTCAAACT | | UCAAACU | | GUUUGACG | | UCAAACU | | GUUUGACG | |
| | | | | | | GACGGAT | | GACGGAU | | GUAAGAA | | GACGGAA | | GUAAGAA | |
| NM_ | 4536- | ususacc(Ghd)UfcAfAfA | 4120 | VPusAfsuccGfuCfAfgu | 4454 | TCTTACCG | 4788 | UUACCGU | 5122 | AAUCCGUC | 5456 | UUACCGU | 5790 | UAUCCGUC | 6124 |
| 002973.3 | 4558 | fcugacggauaL96 | | uuGfaCfgguaasgsa | | TCAAACTG | | CAAACUG | | AGUUUGAC | | CAAACUG | | AGUUUGAC | |
| | | | | | | ACGGATT | | ACGGAUU | | GGUAAGA | | ACGGAUA | | GGUAAGA | |
| NM_ | 4537- | usasccg(Uhd)CfaAfAfC | 4121 | VPusAfsaucCfgUfCfag | 4455 | CTTACCGT | 4789 | UACCGUC | 5123 | UAAUCCGU | 5457 | UACCGUC | 5791 | UAAUCCGU | 6125 |
| 002973.3 | 4559 | fugacggauuaL96 | | uuUfgAfcgguasasg | | CAAACTGA | | AAACUGA | | CAGUUUGA | | AAACUGA | | CAGUUUGA | |
| | | | | | | CGGATTA | | CGGAUUA | | CGGUAAG | | CGGAUUA | | CGGUAAG | |
| NM_ | 4537- | usasccg(Uhd)CfaAfAfC | 4122 | VPusAfsaucCfgUfCfag | 4456 | CTTACCGT | 4790 | UACCGUC | 5124 | UAAUCCGU | 5458 | UACCGUC | 5792 | UAAUCCGU | 6126 |
| 002973.3 | 4559 | fugacggauuaL96 | | uuUfgAfcgguasasg | | CAAACTGA | | AAACUGA | | CAGUUUGA | | AAACUGA | | CAGUUUGA | |
| | | | | | | CGGATTA | | CGGAUUA | | CGGUAAG | | CGGAUUA | | CGGUAAG | |
| NM_ | 4538- | ascscgu(Chd)AfaAfCfU | 4123 | VPusUfsaauCfcGfUfca | 4457 | TTACCGTC | 4791 | ACCGUCA | 5125 | AUAAUCCG | 5459 | ACCGUCA | 5793 | UUAAUCCG | 6127 |
| 002973.3 | 4560 | fgacggauuaaL96 | | guUfuGfacggusasa | | AAACTGAC | | AACUGAC | | UCAGUUUG | | AACUGAC | | UCAGUUUG | |
| | | | | | | GGATTAT | | GGAUUAU | | ACGGUAA | | GGAUUAA | | ACGGUAA | |
| NM_ | 4545- | asascug(Ahd)CfgGfAfU | 4124 | VPusUfsaaaUfaAfUfaa | 4458 | CAAACTGA | 4792 | AACUGAC | 5126 | AUAAAUAA | 5460 | AACUGAC | 5794 | UUAAAUAA | 6128 |
| 002973.3 | 4567 | fuauuauuuaaL96 | | ucCfgUfcaguususg | | CGGATTAT | | GGAUUAU | | UAAUCCGU | | GGAUUAU | | UAAUCCGU | |
| | | | | | | TATTTAT | | UAUUUAU | | CAGUUUG | | UAUUUAA | | CAGUUUG | |
| NM_ | 4572- | asgsuuu(Ghd)AfuGfAfG | 4125 | VPusAfsgugAfuCfAfcc | 4459 | CAAGTTTG | 4793 | AGUUUGA | 5127 | CAGUGAUC | 5461 | AGUUUGA | 5795 | UAGUGAUC | 6129 |
| 002973.3 | 4594 | fgugaucacuaL96 | | ucAfuCfaaacususg | | ATGAGGTG | | UGAGGUG | | ACCUCAUC | | UGAGGUG | | ACCUCAUC | |
| | | | | | | ATCACTG | | AUCACUG | | AAACUUG | | AUCACUA | | AAACUUG | |
| NM_ | 4589- | ascsugu(Chd)UfaCfAfG | 4126 | VPusGfsuugAfaCfCfac | 4460 | TCACTGTC | 4794 | ACUGUCU | 5128 | AGUUGAAC | 5462 | ACUGUCU | 5796 | UGUUGAAC | 6130 |
| 002973.3 | 4611 | fugguucaacaL96 | | ugUfaGfacagusgsa | | TACAGTGG | | ACAGUGG | | CACUGUAG | | ACAGUGG | | CACUGUAG | |
| | | | | | | TTCAACT | | UUCAACU | | ACAGUGA | | UUCAACA | | ACAGUGA | |
| NM_ | 4590- | csusguc(Uhd)AfcAfGfU | 4127 | VPusAfsguuGfaAfCfca | 4461 | CACTGTCT | 4795 | CUGUCUA | 5129 | AAGUUGAA | 5463 | CUGUCUA | 5797 | UAGUUGAA | 6131 |
| 002973.3 | 4612 | fgguucaacuaL96 | | cuGfuAfgacagsusg | | ACAGTGGT | | CAGUGGU | | CCACUGUA | | CAGUGGU | | CCACUGUA | |
| | | | | | | TCAACTT | | UCAACUU | | GACAGUG | | UCAACUA | | GACAGUG | |
| NM_ | 4594- | csusaca(Ghd)UfgGfUfU | 4128 | VPusUfsaaaAfgUfUfga | 4462 | GTCTACAG | 4796 | CUACAGU | 5130 | UUAAAAGU | 5464 | CUACAGU | 5798 | UUAAAAGU | 6132 |
| 002973.3 | 4616 | fcaacuuuuaaL96 | | acCfaCfuguagsasc | | TGGTTCAA | | GGUUCAA | | UGAACCAC | | GGUUCAA | | UGAACCAC | |
| | | | | | | CTTTTAA | | CUUUUAA | | UGUAGAC | | CUUUUAA | | UGUAGAC | |
| NM_ | 4595- | usascag(Uhd)GfgUfUfC | 4129 | VPusUfsuaaAfaGfUfug | 4463 | TCTACAGT | 4797 | UACAGUG | 5131 | CUUAAAAG | 5465 | UACAGUG | 5799 | UUUAAAAG | 6133 |
| 002973.3 | 4617 | faacuuuuaaaL96 | | aaCfcAfcuguasgsa | | GGTTCAAC | | GUUCAAC | | UUGAACCA | | GUUCAAC | | UUGAACCA | |
| | | | | | | TTTTAAG | | UUUUAAG | | CUGUAGA | | UUUUAAA | | CUGUAGA | |
| NM_ | 4604- | uscsaac(Uhd)UfuUfAfA | 4130 | VPusUfscccUfuAfAfcu | 4464 | GTTCAACT | 4798 | UCAACUU | 5132 | UUCCCUUA | 5466 | UCAACUU | 5800 | UUCCCUUA | 6134 |
| 002973.3 | 4626 | fguuaagggaaL96 | | uaAfaAfguugasasc | | TTTAAGTT | | UUAAGUU | | ACUUAAAA | | UUAAGUU | | ACUUAAAA | |
| | | | | | | AAGGGAA | | AAGGGAA | | GUUGAAC | | AAGGGAA | | GUUGAAC | |
| NM_ | 4606- | asascuu(Uhd)UfaAfGfU | 4131 | VPusUfsuucCfcUfUfaa | 4465 | TCAACTTTT | 4799 | AACUUUU | 5133 | UUUUCCCU | 5467 | AACUUUU | 5801 | UUUUCCCU | 6135 |
| 002973.3 | 4628 | fuaagggaaaaL96 | | cuUfaAfaaguusgsa | | AAGTTAAG | | AAGUUAA | | UAACUUAA | | AAGUUAA | | UAACUUAA | |
| | | | | | | GGAAAA | | GGGAAAA | | AAGUUGA | | GGGAAAA | | AAGUUGA | |
| NM_ | 4623- | asasaaa(Chd)UfuUfUfA | 4132 | VPusUfscuaCfaAfAfgu | 4466 | GGAAAAAC | 4800 | AAAAACU | 5134 | AUCUACAA | 5468 | AAAAACU | 5802 | UUCUACAA | 6136 |
| 002973.3 | 4645 | fcuuuguagaaL96 | | aaAfaGfuuuuuscsc | | TTTTACTTT | | UUUACUU | | AGUAAAAG | | UUUACUU | | AGUAAAAG | |
| | | | | | | GTAGAT | | UGUAGAU | | UUUUUCC | | UGUAGAA | | UUUUUCC | |
| NM_ | 557- | csuscag(Uhd)CfuAfCfG | 4133 | VPusAfsaaaGfaAfAfuc | 4467 | GCCTCAGT | 4801 | CUCAGUC | 5135 | CAAAAGAA | 5469 | CUCAGUC | 5803 | UAAAAGAA | 6137 |
| 002973.4 | 579 | fauuucuuuuaL96 | | guAfgAfcugagsgsc | | CTACGATT | | UACGAUU | | AUCGUAGA | | UACGAUU | | AUCGUAGA | |
| | | | | | | TCTTTTG | | UCUUUUG | | CUGAGGC | | UCUUUUA | | CUGAGGC | |
| NM_ | 558- | uscsagu(Chd)UfaCfGfA | 4134 | VPusCfsaaaAfgAfAfau | 4468 | CCTCAGTC | 4802 | UCAGUCU | 5136 | UCAAAAGA | 5470 | UCAGUCU | 5804 | UCAAAAGA | 6138 |
| 002973.4 | 580 | fuuucuuuugaL96 | | cgUfaGfacugasgsg | | TACGATTT | | ACGAUUU | | AAUCGUAG | | ACGAUUU | | AAUCGUAG | |
| | | | | | | CTTTTGA | | CUUUUGA | | ACUGAGG | | CUUUUGA | | ACUGAGG | |
| NM_ | 559- | csasguc(Uhd)AfcGfAfU | 4135 | VPusUfscaaAfaGfAfaa | 4469 | CTCAGTCT | 4803 | CAGUCUA | 5137 | AUCAAAAG | 5471 | CAGUCUA | 5805 | UUCAAAAG | 6139 |
| 002973.4 | 581 | fuucuuuugaaL96 | | ucGfuAfgacugsasg | | ACGATTTC | | CGAUUUC | | AAAUCGUA | | CGAUUUC | | AAAUCGUA | |
| | | | | | | TTTTGAT | | UUUUGAU | | GACUGAG | | UUUUGAA | | GACUGAG | |
| NM_ | 724- | csasuga(Ghd)AfaAfAfG | 4136 | VPusGfsauuCfuGfUfac | 4470 | CACATGAG | 4804 | CAUGAGA | 5138 | GGAUUCUG | 5472 | CAUGAGA | 5806 | UGAUUCUG | 6140 |
| 002973.4 | 746 | fuacagaaucaL96 | | uuUfuCfucaugsusg | | AAAAGTAC | | AAAGUAC | | UACUUUUC | | AAAGUAC | | UACUUUUC | |
| | | | | | | AGAATCC | | AGAAUCC | | UCAUGUG | | AGAAUCA | | UCAUGUG | |
| NM_ | 724- | csasuga(Ghd)AfaAfAfG | 4137 | VPusGfsauuCfuGfUfac | 4471 | CACATGAG | 4805 | CAUGAGA | 5139 | GGAUUCUG | 5473 | CAUGAGA | 5807 | UGAUUCUG | 6141 |
| 002973.4 | 746 | fuacagaaucaL96 | | uuUfuCfucaugsusg | | AAAAGTAC | | AAAGUAC | | UACUUUUC | | AAAGUAC | | UACUUUUC | |
| | | | | | | AGAATCC | | AGAAUCC | | UCAUGUG | | AGAAUCA | | UCAUGUG | |
| NM_ | 790- | asasaug(Uhd)UfcAfGfA | 4138 | VPusAfscaaCfaAfAfgu | 4472 | TCAAATGT | 4806 | AAAUGUU | 5140 | CACAACAA | 5474 | AAAUGUU | 5808 | UACAACAA | 6142 |
| 002973.4 | 812 | fcuuuguuguaL96 | | cuGfaAfcauuusgsa | | TCAGACTT | | CAGACUU | | AGUCUGAA | | CAGACUU | | AGUCUGAA | |
| | | | | | | TGTTGTG | | UGUUGUG | | CAUUUGA | | UGUUGUA | | CAUUUGA | |
| NM_ | 867- | usgscua(Uhd)CfaGfUfG | 4139 | VPusUfscacUfuUfAfgc | 4473 | TCTGCTAT | 4807 | UGCUAUC | 5141 | UUCACUUU | 5475 | UGCUAUC | 5809 | UUCACUUU | 6143 |
| 002973.4 | 889 | fcuaaagugaaL96 | | acUfgAfuagcasgsa | | CAGTGCTA | | AGUGCUA | | AGCACUGA | | AGUGCUA | | AGCACUGA | |
| | | | | | | AAGTGAA | | AAGUGAA | | UAGCAGA | | AAGUGAA | | UAGCAGA | |
| NM_ | 1040- | csgsuau(Ghd)AfuAfGfC | 4140 | VPusAfsgauAfaAfCfug | 4474 | TACGTATG | 4808 | CGUAUGA | 5142 | AAGAUAAA | 5476 | CGUAUGA | 5810 | UAGAUAAA | 6144 |
| 002973.4 | 1062 | faguuuaucuaL96 | | cuAfuCfauacgsusa | | ATAGCAGT | | UAGCAGU | | CUGCUAUC | | UAGCAGU | | CUGCUAUC | |
| | | | | | | TTATCTT | | UUAUCUU | | AUACGUA | | UUAUCUA | | AUACGUA | |
| NM_ | 1041- | gsusaug(Ahd)UfaGfCfA | 4141 | VPusAfsagaUfaAfAfcu | 4475 | ACGTATGA | 4809 | GUAUGAU | 5143 | GAAGAUAA | 5477 | GUAUGAU | 5811 | UAAGAUAA | 6145 |
| 002973.4 | 1063 | fguuuaucuuaL96 | | gcUfaUfcauacsgsu | | TAGCAGTT | | AGCAGUU | | ACUGCUAU | | AGCAGUU | | ACUGCUAU | |
| | | | | | | TATCTTC | | UAUCUUC | | CAUACGU | | UAUCUUA | | CAUACGU | |
| NM_ | 1084- | gsasuaa(Chd)UfcAfGfA | 4142 | VPusAfsaaaAfuUfCfuu | 4476 | GAGATAAC | 4810 | GAUAACU | 5144 | UAAAAAUU | 5478 | GAUAACU | 5812 | UAAAAAUU | 6146 |
| 002973.4 | 1106 | fagaauuuuuaL96 | | cuGfaGfuuaucsusc | | TCAGAAGA | | CAGAAGA | | CUUCUGAG | | CAGAAGA | | CUUCUGAG | |
| | | | | | | ATTTTTA | | AUUUUUA | | UUAUCUC | | AUUUUUA | | UUAUCUC | |
| NM_ | 1380- | asuscca(Chd)UfuCfUfC | 4143 | VPusCfsugaAfgUfGfug | 4477 | AGATCCAC | 4811 | AUCCACU | 5145 | UCUGAAGU | 5479 | AUCCACU | 5813 | UCUGAAGU | 6147 |
| 002973.4 | 1402 | facacuucagaL96 | | agAfaGfuggauscsu | | TTCTCACA | | UCUCACA | | GUGAGAAG | | UCUCACA | | GUGAGAAG | |
| | | | | | | CTTCAGA | | CUUCAGA | | UGGAUCU | | CUUCAGA | | UGGAUCU | |
| NM_ | 1387- | uscsuca(Chd)AfcUfUfC | 4144 | VPusUfsugaAfaUfCfug | 4478 | CTTCTCAC | 4812 | UCUCACA | 5146 | GUUGAAAU | 5480 | UCUCACA | 5814 | UUUGAAAU | 6148 |
| 002973.4 | 1409 | fagauuucaaaL96 | | aaGfuGfugagasasg | | ACTTCAGA | | CUUCAGA | | CUGAAGUG | | CUUCAGA | | CUGAAGUG | |
| | | | | | | TTTCAAC | | UUUCAAC | | UGAGAAG | | UUUCAAA | | UGAGAAG | |
| NM_ | 1623- | csuscua(Chd)UfaUfGfC | 4145 | VPusUfsgcgUfuUfAfg | 4479 | GTCTCTAC | 4813 | CUCUACU | 5147 | AUGCGUUU | 5481 | CUCUACU | 5815 | UUGCGUUU | 6149 |
| 002973.4 | 1645 | fcuaaacgcaaL96 | | gcaUfaGfuagagsasc | | TATGCCTA | | AUGCCUA | | AGGCAUAG | | AUGCCUA | | AGGCAUAG | |
| | | | | | | AACGCAT | | AACGCAU | | UAGAGAC | | AACGCAA | | UAGAGAC | |
| NM_ | 1624- | uscsuac(Uhd)AfuGfCfC | 4146 | VPusAfsugcGfuUfUfag | 4480 | TCTCTACT | 4814 | UCUACUA | 5148 | CAUGCGUU | 5482 | UCUACUA | 5816 | UAUGCGUU | 6150 |
| 002973.4 | 1646 | fuaaacgcauaL96 | | gcAfuAfguagasgsa | | ATGCCTAA | | UGCCUAA | | UAGGCAUA | | UGCCUAA | | UAGGCAUA | |
| | | | | | | ACGCATG | | ACGCAUG | | GUAGAGA | | ACGCAUA | | GUAGAGA | |
| NM_ | 1692- | uscsgaa(Ahd)UfcAfCfA | 4147 | VPusCfsagaAfaCfUfcu | 4481 | CCTCGAAA | 4815 | UCGAAAU | 5149 | GCAGAAAC | 5483 | UCGAAAU | 5817 | UCAGAAAC | 6151 |
| 002973.4 | 1714 | fgaguuucugaL96 | | guGfaUfuucgasgsg | | TCACAGAG | | CACAGAG | | UCUGUGAU | | CACAGAG | | UCUGUGAU | |
| | | | | | | TTTCTGC | | UUUCUGC | | UUCGAGG | | UUUCUGA | | UUCGAGG | |
| NM_ | 1693- | csgsaaa(Uhd)CfaCfAfG | 4148 | VPusGfscagAfaAfCfuc | 4482 | CTCGAAAT | 4816 | CGAAAUC | 5150 | AGCAGAAA | 5484 | CGAAAUC | 5818 | UGCAGAAA | 6152 |
| 002973.4 | 1715 | faguuucugcaL96 | | ugUfgAfuuucgsasg | | CACAGAGT | | ACAGAGU | | CUCUGUGA | | ACAGAGU | | CUCUGUGA | |
| | | | | | | TTCTGCT | | UUCUGCU | | UUUCGAG | | UUCUGCA | | UUUCGAG | |
| NM_ | 2225- | gsusucu(Ahd)CfuUfCfU | 4149 | VPusCfsauaGfaUfUfca | 4483 | AAGTTCTA | 4817 | GUUCUAC | 5151 | CCAUAGAU | 5485 | GUUCUAC | 5819 | UCAUAGAU | 6153 |
| 002973.4 | 2247 | fgaaucuaugaL96 | | gaAfgUfagaacsusu | | CTTCTGAA | | UUCUGAA | | UCAGAAGU | | UUCUGAA | | UCAGAAGU | |
| | | | | | | TCTATGG | | UCUAUGG | | AGAACUU | | UCUAUGA | | AGAACUU | |
| NM_ | 2226- | ususcua(Chd)UfuCfUfG | 4150 | VPusCfscauAfgAfUfuc | 4484 | AGTTCTAC | 4818 | UUCUACU | 5152 | UCCAUAGA | 5486 | UUCUACU | 5820 | UCCAUAGA | 6154 |
| 002973.4 | 2248 | faaucuauggaL96 | | agAfaGfuagaascsu | | TTCTGAAT | | UCUGAAU | | UUCAGAAG | | UCUGAAU | | UUCAGAAG | |
| | | | | | | CTATGGA | | CUAUGGA | | UAGAACU | | CUAUGGA | | UAGAACU | |
| NM_ | 2227- | uscsuac(Uhd)UfcUfGfA | 4151 | VPusUfsccaUfaGfAfuu | 4485 | GTTCTACTT | 4819 | UCUACUU | 5153 | AUCCAUAG | 5487 | UCUACUU | 5821 | UUCCAUAG | 6155 |
| 002973.4 | 2249 | faucuauggaaL96 | | caGfaAfguagasasc | | CTGAATCT | | CUGAAUC | | AUUCAGAA | | CUGAAUC | | AUUCAGAA | |
| | | | | | | ATGGAT | | UAUGGAU | | GUAGAAC | | UAUGGAA | | GUAGAAC | |
| NM_ | 2228- | csusacu(Uhd)CfuGfAfA | 4152 | VPusAfsuccAfuAfGfau | 4486 | TTCTACTTC | 4820 | CUACUUC | 5154 | GAUCCAUA | 5488 | CUACUUC | 5822 | UAUCCAUA | 6156 |
| 002973.4 | 2250 | fucuauggauaL96 | | ucAfgAfaguagsasa | | TGAATCTA | | UGAAUCU | | GAUUCAGA | | UGAAUCU | | GAUUCAGA | |
| | | | | | | TGGATC | | AUGGAUC | | AGUAGAA | | AUGGAUA | | AGUAGAA | |
| NM_ | 2235- | usgsaau(Chd)UfaUfGfG | 4153 | VPusGfsuagUfuGfAfuc | 4487 | TCTGAATC | 4821 | UGAAUCU | 5155 | AGUAGUUG | 5489 | UGAAUCU | 5823 | UGUAGUUG | 6157 |
| 002973.4 | 2257 | faucaacuacaL96 | | caUfaGfauucasgsa | | TATGGATC | | AUGGAUC | | AUCCAUAG | | AUGGAUC | | AUCCAUAG | |
| | | | | | | AACTACT | | AACUACU | | AUUCAGA | | AACUACA | | AUUCAGA | |
| NM_ | 2235- | usgsaau(Chd)UfaUfGfG | 4154 | VPusGfsuagUfuGfAfuc | 4488 | TCTGAATC | 4822 | UGAAUCU | 5156 | AGUAGUUG | 5490 | UGAAUCU | 5824 | UGUAGUUG | 6158 |
| 002973.4 | 2257 | faucaacuacaL96 | | caUfaGfauucasgsa | | TATGGATC | | AUGGAUC | | AUCCAUAG | | AUGGAUC | | AUCCAUAG | |
| | | | | | | AACTACT | | AACUACU | | AUUCAGA | | AACUACA | | AUUCAGA | |
| NM_ | 2250- | ascsuac(Uhd)AfaAfCfA | 4155 | VPusCfsucuAfuUfUfuu | 4489 | CAACTACT | 4823 | ACUACUA | 5157 | UCUCUAUU | 5491 | ACUACUA | 5825 | UCUCUAUU | 6159 |
| 002973.4 | 2272 | faaaauagagaL96 | | guUfuAfguagususg | | AAACAAAA | | AACAAAA | | UUUGUUUA | | AACAAAA | | UUUGUUUA | |
| | | | | | | ATAGAGA | | AUAGAGA | | GUAGUUG | | AUAGAGA | | GUAGUUG | |
| NM_ | 2310- | ascscaa(Ghd)UfgCfUfA | 4156 | VPusAfsagaAfuCfCfuu | 4490 | GAACCAAG | 4824 | ACCAAGU | 5158 | AAAGAAUC | 5492 | ACCAAGU | 5826 | UAAGAAUC | 6160 |
| 002973.4 | 2332 | faggauucuuaL96 | | agCfaCfuuggususc | | TGCTAAGG | | GCUAAGG | | CUUAGCAC | | GCUAAGG | | CUUAGCAC | |
| | | | | | | ATTCTTT | | AUUCUUU | | UUGGUUC | | AUUCUUA | | UUGGUUC | |
| NM_ | 2525- | ususagg(Ahd)AfaUfCfA | 4157 | VPusAfsuucAfaUfGfuu | 4491 | AGTTAGGA | 4825 | UUAGGAA | 5159 | GAUUCAAU | 5493 | UUAGGAA | 5827 | UAUUCAAU | 6161 |
| 002973.4 | 2547 | facauugaauaL96 | | gaUfuUfccuaascsu | | AATCAACA | | AUCAACA | | GUUGAUUU | | AUCAACA | | GUUGAUUU | |
| | | | | | | TTGAATC | | UUGAAUC | | CCUAACU | | UUGAAUA | | CCUAACU | |
| NM_ | 2657- | asgscca(Ahd)CfuCfCfA | 4158 | VPusAfsguaUfaAfAfcu | 4492 | ACAGCCAA | 4826 | AGCCAAC | 5160 | GAGUAUAA | 5494 | AGCCAAC | 5828 | UAGUAUAA | 6162 |
| 002973.4 | 2679 | fguuuauacuaL96 | | ggAfgUfuggcusgsu | | CTCCAGTT | | UCCAGUU | | ACUGGAGU | | UCCAGUU | | ACUGGAGU | |
| | | | | | | TATACTC | | UAUACUC | | UGGCUGU | | UAUACUA | | UGGCUGU | |
| NM_ | 3066- | ususcuu(Chd)AfgCfAfA | 4159 | VPusCfsguaCfuGfAfgu | 4493 | TCTTCTTCA | 4827 | UUCUUCA | 5161 | CCGUACUG | 5495 | UUCUUCA | 5829 | UCGUACUG | 6163 |
| 002973.4 | 3088 | fcucaguacgaL96 | | ugCfuGfaagaasgsa | | GCAACTCA | | GCAACUC | | AGUUGCUG | | GCAACUC | | AGUUGCUG | |
| | | | | | | GTACGG | | AGUACGG | | AAGAAGA | | AGUACGA | | AAGAAGA | |
| NM_ | 3156- | ususucu(Ahd)CfuUfUfG | 4160 | VPusUfsggaAfaUfGfgc | 4494 | TCTTTCTAC | 4828 | UUUCUAC | 5162 | GUGGAAAU | 5496 | UUUCUAC | 5830 | UUGGAAAU | 6164 |
| 002973.4 | 3178 | fccauuuccaaL96 | | aaAfgUfagaaasgsa | | TTTGCCATT | | UUUGCCA | | GGCAAAGU | | UUUGCCA | | GGCAAAGU | |
| | | | | | | TCCAC | | UUUCCAC | | AGAAAGA | | UUUCCAA | | AGAAAGA | |
| NM_ | 3157- | ususcua(Chd)UfuUfGfC | 4161 | VPusGfsuggAfaAfUfg | 4495 | CTTTCTACT | 4829 | UUCUACU | 5163 | CGUGGAAA | 5497 | UUCUACU | 5831 | UGUGGAAA | 6165 |
| 002973.4 | 3179 | fcauuuccacaL96 | | gcaAfaGfuagaasasg | | TTGCCATTT | | UUGCCAU | | UGGCAAAG | | UUGCCAU | | UGGCAAAG | |
| | | | | | | CCACG | | UUCCACG | | UAGAAAG | | UUCCACA | | UAGAAAG | |
| NM_ | 3860- | uscsuug(Uhd)AfaCfAfU | 4162 | VPusUfsccuAfuUfGfga | 4496 | TTTCTTGTA | 4830 | UCUUGUA | 5164 | UUCCUAUU | 5498 | UCUUGUA | 5832 | UUCCUAUU | 6166 |
| 002973.4 | 3882 | fccaauaggaaL96 | | ugUfuAfcaagasasa | | ACATCCAA | | ACAUCCA | | GGAUGUUA | | ACAUCCA | | GGAUGUUA | |
| | | | | | | TAGGAA | | AUAGGAA | | CAAGAAA | | AUAGGAA | | CAAGAAA | |
| NM_ | 4002- | cscsgaa(Ahd)CfuGfGfA | 4163 | VPusUfsaaaUfaAfCfuu | 4497 | TGCCGAAA | 4831 | CCGAAAC | 5165 | AUAAAUAA | 5499 | CCGAAAC | 5833 | UUAAAUAA | 6167 |
| 002973.4 | 4024 | faguuauuuaaL96 | | ccAfgUfuucggscsa | | CTGGAAGT | | UGGAAGU | | CUUCCAGU | | UGGAAGU | | CUUCCAGU | |
| | | | | | | TATTTAT | | UAUUUAU | | UUCGGCA | | UAUUUAA | | UUCGGCA | |
| NM_ | 4002- | cscsgaa(Ahd)CfuGfGfA | 4164 | VPusUfsaaaUfaAfCfuu | 4498 | TGCCGAAA | 4832 | CCGAAAC | 5166 | AUAAAUAA | 5500 | CCGAAAC | 5834 | UUAAAUAA | 6168 |
| 002973.4 | 4024 | faguuauuuaaL96 | | ccAfgUfuucggscsa | | CTGGAAGT | | UGGAAGU | | CUUCCAGU | | UGGAAGU | | CUUCCAGU | |
| | | | | | | TATTTAT | | UAUUUAU | | UUCGGCA | | UAUUUAA | | UUCGGCA | |
| NM_ | 4002- | cscsgaa(Ahd)CfuGfGfA | 4165 | VPusUfsaaaUfaAfCfuu | 4499 | TGCCGAAA | 4833 | CCGAAAC | 5167 | AUAAAUAA | 5501 | CCGAAAC | 5835 | UUAAAUAA | 6169 |
| 002973.4 | 4024 | faguuauuuaaL96 | | ccAfgUfuucggscsa | | CTGGAAGT | | UGGAAGU | | CUUCCAGU | | UGGAAGU | | CUUCCAGU | |
| | | | | | | TATTTAT | | UAUUUAU | | UUCGGCA | | UAUUUAA | | UUCGGCA | |
| NM_ | 4005- | asasacu(Ghd)GfaAfGfU | 4166 | VPusAfsaauAfaAfUfaa | 4500 | CGAAACTG | 4834 | AAACUGG | 5168 | AAAAUAAA | 5502 | AAACUGG | 5836 | UAAAUAAA | 6170 |
| 002973.4 | 4027 | fuauuuauuuaL96 | | cuUfcCfaguuuscsg | | GAAGTTAT | | AAGUUAU | | UAACUUCC | | AAGUUAU | | UAACUUCC | |
| | | | | | | TTATTTT | | UUAUUUU | | AGUUUCG | | UUAUUUA | | AGUUUCG | |
| NM_ | 4035- | csusuga(Ahd)AfgUfCfA | 4167 | VPusAfsuguGfuUfCfau | 4501 | CCCTTGAA | 4835 | CUUGAAA | 5169 | GAUGUGUU | 5503 | CUUGAAA | 5837 | UAUGUGUU | 6171 |
| 002973.4 | 4057 | fugaacacauaL96 | | gaCfuUfucaagsgsg | | AGTCATGA | | GUCAUGA | | CAUGACUU | | GUCAUGA | | CAUGACUU | |
| | | | | | | ACACATC | | ACACAUC | | UCAAGGG | | ACACAUA | | UCAAGGG | |
| NM_ | 4035- | csusuga(Ahd)AfgUfCfA | 4168 | VPusAfsuguGfuUfCfau | 4502 | CCCTTGAA | 4836 | CUUGAAA | 5170 | GAUGUGUU | 5504 | CUUGAAA | 5838 | UAUGUGUU | 6172 |
| 002973.4 | 4057 | fugaacacauaL96 | | gaCfuUfucaagsgsg | | AGTCATGA | | GUCAUGA | | CAUGACUU | | GUCAUGA | | CAUGACUU | |
| | | | | | | ACACATC | | ACACAUC | | UCAAGGG | | ACACAUA | | UCAAGGG | |
| NM_ | 4041- | asgsuca(Uhd)GfaAfCfA | 4169 | VPusUfsagcUfgAfUfgu | 4503 | AAAGTCAT | 4837 | AGUCAUG | 5171 | CUAGCUGA | 5505 | AGUCAUG | 5839 | UUAGCUGA | 6173 |
| 002973.4 | 4063 | fcaucagcuaaL96 | | guUfcAfugacususu | | GAACACAT | | AACACAU | | UGUGUUCA | | AACACAU | | UGUGUUCA | |
| | | | | | | CAGCTAG | | CAGCUAG | | UGACUUU | | CAGCUAA | | UGACUUU | |
| NM_ | 4041- | asgsuca(Uhd)GfaAfCfA | 4170 | VPusUfsagcUfgAfUfgu | 4504 | AAAGTCAT | 4838 | AGUCAUG | 5172 | CUAGCUGA | 5506 | AGUCAUG | 5840 | UUAGCUGA | 6174 |
| 002973.4 | 4063 | fcaucagcuaaL96 | | guUfcAfugacususu | | GAACACAT | | AACACAU | | UGUGUUCA | | AACACAU | | UGUGUUCA | |
| | | | | | | CAGCTAG | | CAGCUAG | | UGACUUU | | CAGCUAA | | UGACUUU | |
| NM_ | 4041- | asgsuca(Uhd)GfaAfCfA | 4171 | VPusUfsagcUfgAfUfgu | 4505 | AAAGTCAT | 4839 | AGUCAUG | 5173 | CUAGCUGA | 5507 | AGUCAUG | 5841 | UUAGCUGA | 6175 |
| 002973.4 | 4063 | fcaucagcuaaL96 | | guUfcAfugacususu | | GAACACAT | | AACACAU | | UGUGUUCA | | AACACAU | | UGUGUUCA | |
| | | | | | | CAGCTAG | | CAGCUAG | | UGACUUU | | CAGCUAA | | UGACUUU | |
| NM_ | 4042- | gsuscau(Ghd)AfaCfAfC | 4172 | VPusCfsuagCfuGfAfug | 4506 | AAGTCATG | 4840 | GUCAUGA | 5174 | GCUAGCUG | 5508 | GUCAUGA | 5842 | UCUAGCUG | 6176 |
| 002973.4 | 4064 | faucagcuagaL96 | | ugUfuCfaugacsusu | | AACACATC | | ACACAUC | | AUGUGUUC | | ACACAUC | | AUGUGUUC | |
| | | | | | | AGCTAGC | | AGCUAGC | | AUGACUU | | AGCUAGA | | AUGACUU | |
| NM_ | 4042- | gsuscau(Ghd)AfaCfAfC | 4173 | VPusCfsuagCfuGfAfug | 4507 | AAGTCATG | 4841 | GUCAUGA | 5175 | GCUAGCUG | 5509 | GUCAUGA | 5843 | UCUAGCUG | 6177 |
| 002973.4 | 4064 | faucagcuagaL96 | | ugUfuCfaugacsusu | | AACACATC | | ACACAUC | | AUGUGUUC | | ACACAUC | | AUGUGUUC | |
| | | | | | | AGCTAGC | | AGCUAGC | | AUGACUU | | AGCUAGA | | AUGACUU | |
| NM_ | 4044- | csasuga(Ahd)CfaCfAfU | 4174 | VPusUfsgcuAfgCfUfga | 4508 | GTCATGAA | 4842 | CAUGAAC | 5176 | UUGCUAGC | 5510 | CAUGAAC | 5844 | UUGCUAGC | 6178 |
| 002973.4 | 4066 | fcagcuagcaaL96 | | ugUfgUfucaugsasc | | CACATCAG | | ACAUCAG | | UGAUGUGU | | ACAUCAG | | UGAUGUGU | |
| | | | | | | CTAGCAA | | CUAGCAA | | UCAUGAC | | CUAGCAA | | UCAUGAC | |
| NM_ | 4076- | asgsagu(Ghd)AfuUfCfU | 4175 | VPusAfsuagCfaGfCfaa | 4509 | CAAGAGTG | 4843 | AGAGUGA | 5177 | AAUAGCAG | 5511 | AGAGUGA | 5845 | UAUAGCAG | 6179 |
| 002973.4 | 4098 | fugcugcuauaL96 | | gaAfuCfacucususg | | ATTCTTGCT | | UUCUUGC | | CAAGAAUC | | UUCUUGC | | CAAGAAUC | |
| | | | | | | GCTATT | | UGCUAUU | | ACUCUUG | | UGCUAUA | | ACUCUUG | |
| NM_ | 4076- | asgsagu(Ghd)AfuUfCfU | 4176 | VPusAfsuagCfaGfCfaa | 4510 | CAAGAGTG | 4844 | AGAGUGA | 5178 | AAUAGCAG | 5512 | AGAGUGA | 5846 | UAUAGCAG | 6180 |
| 002973.4 | 4098 | fugcugcuauaL96 | | gaAfuCfacucususg | | ATTCTTGCT | | UUCUUGC | | CAAGAAUC | | UUCUUGC | | CAAGAAUC | |
| | | | | | | GCTATT | | UGCUAUU | | ACUCUUG | | UGCUAUA | | ACUCUUG | |
| NM_ | 4079- | gsusgau(Uhd)CfuUfGfC | 4177 | VPusGfsuaaUfaGfCfag | 4511 | GAGTGATT | 4845 | GUGAUUC | 5179 | AGUAAUAG | 5513 | GUGAUUC | 5847 | UGUAAUAG | 6181 |
| 002973.4 | 4101 | fugcuauuacaL96 | | caAfgAfaucacsusc | | CTTGCTGC | | UUGCUGC | | CAGCAAGA | | UUGCUGC | | CAGCAAGA | |
| | | | | | | TATTACT | | UAUUACU | | AUCACUC | | UAUUACA | | AUCACUC | |
| NM_ | 4079- | gsusgau(Uhd)CfuUfGfC | 4178 | VPusGfsuaaUfaGfCfag | 4512 | GAGTGATT | 4846 | GUGAUUC | 5180 | AGUAAUAG | 5514 | GUGAUUC | 5848 | UGUAAUAG | 6182 |
| 002973.4 | 4101 | fugcuauuacaL96 | | caAfgAfaucacsusc | | CTTGCTGC | | UUGCUGC | | CAGCAAGA | | UUGCUGC | | CAGCAAGA | |
| | | | | | | TATTACT | | UAUUACU | | AUCACUC | | UAUUACA | | AUCACUC | |
| NM_ | 4137- | csgsccc(Uhd)UfuUfAfC | 4179 | VPusUfscaaGfuUfUfag | 4513 | AACGCCCT | 4847 | CGCCCUU | 5181 | GUCAAGUU | 5515 | CGCCCUU | 5849 | UUCAAGUU | 6183 |
| 002973.4 | 4159 | fuaaacuugaaL96 | | uaAfaAfgggcgsusu | | TTTACTAA | | UUACUAA | | UAGUAAAA | | UUACUAA | | UAGUAAAA | |
| | | | | | | ACTTGAC | | ACUUGAC | | GGGCGUU | | ACUUGAA | | GGGCGUU | |
| NM_ | 4137- | csgsccc(Uhd)UfuUfAfC | 4180 | VPusUfscaaGfuUfUfag | 4514 | AACGCCCT | 4848 | CGCCCUU | 5182 | GUCAAGUU | 5516 | CGCCCUU | 5850 | UUCAAGUU | 6184 |
| 002973.4 | 4159 | fuaaacuugaaL96 | | uaAfaAfgggcgsusu | | TTTACTAA | | UUACUAA | | UAGUAAAA | | UUACUAA | | UAGUAAAA | |
| | | | | | | ACTTGAC | | ACUUGAC | | GGGCGUU | | ACUUGAA | | GGGCGUU | |
| NM_ | 4176- | usasccg(Uhd)CfaAfAfC | 4181 | VPusAfsaucCfgUfCfag | 4515 | CTTACCGT | 4849 | UACCGUC | 5183 | UAAUCCGU | 5517 | UACCGUC | 5851 | UAAUCCGU | 6185 |
| 002973.4 | 4198 | fugacggauuaL96 | | uuUfgAfcgguasasg | | CAAACTGA | | AAACUGA | | CAGUUUGA | | AAACUGA | | CAGUUUGA | |
| | | | | | | CGGATTA | | CGGAUUA | | CGGUAAG | | CGGAUUA | | CGGUAAG | |
| NM_ | 4228- | ascsugu(Chd)UfaCfAfG | 4182 | VPusGfsuugAfaCfCfac | 4516 | TCACTGTC | 4850 | ACUGUCU | 5184 | AGUUGAAC | 5518 | ACUGUCU | 5852 | UGUUGAAC | 6186 |
| 002973.4 | 4250 | fugguucaacaL96 | | ugUfaGfacagusgsa | | TACAGTGG | | ACAGUGG | | CACUGUAG | | ACAGUGG | | CACUGUAG | |
| | | | | | | TTCAACT | | UUCAACU | | ACAGUGA | | UUCAACA | | ACAGUGA | |
| NM_ | 4228- | ascsugu(Chd)UfaCfAfG | 4183 | VPusGfsuugAfaCfCfac | 4517 | TCACTGTC | 4851 | ACUGUCU | 5185 | AGUUGAAC | 5519 | ACUGUCU | 5853 | UGUUGAAC | 6187 |
| 002973.4 | 4250 | fugguucaacaL96 | | ugUfaGfacagusgsa | | TACAGTGG | | ACAGUGG | | CACUGUAG | | ACAGUGG | | CACUGUAG | |
| | | | | | | TTCAACT | | UUCAACU | | ACAGUGA | | UUCAACA | | ACAGUGA | |
| NM_ | 4237- | asgsugg(Uhd)UfcAfAfC | 4184 | VPusAfsacuUfaAfAfag | 4518 | ACAGTGGT | 4852 | AGUGGUU | 5186 | UAACUUAA | 5520 | AGUGGUU | 5854 | UAACUUAA | 6188 |
| 002973.4 | 4259 | fuuuuaaguuaL96 | | uuGfaAfccacusgsu | | TCAACTTTT | | CAACUUU | | AAGUUGAA | | CAACUUU | | AAGUUGAA | |
| | | | | | | AAGTTA | | UAAGUUA | | CCACUGU | | UAAGUUA | | CCACUGU | |
| NM_ | 4238- | gsusggu(Uhd)CfaAfCfU | 4185 | VPusUfsaacUfuAfAfaa | 4519 | CAGTGGTT | 4853 | GUGGUUC | 5187 | UUAACUUA | 5521 | GUGGUUC | 5855 | UUAACUUA | 6189 |
| 002973.4 | 4260 | fuuuaaguuaaL96 | | guUfgAfaccacsusg | | CAACTTTT | | AACUUUU | | AAAGUUGA | | AACUUUU | | AAAGUUGA | |
| | | | | | | AAGTTAA | | AAGUUAA | | ACCACUG | | AAGUUAA | | ACCACUG | |
| NM_ | 4256- | usasagg(Ghd)AfaAfAfA | 4186 | VPusAfsaguAfaAfAfgu | 4520 | GTTAAGGG | 4854 | UAAGGGA | 5188 | AAAGUAAA | 5522 | UAAGGGA | 5856 | UAAGUAAA | 6190 |
| 002973.4 | 4278 | fcuuuuacuuaL96 | | uuUfuCfccuuasasc | | AAAAACTT | | AAAACUU | | AGUUUUUC | | AAAACUU | | AGUUUUUC | |
| | | | | | | TTACTTT | | UUACUUU | | CCUUAAC | | UUACUUA | | CCUUAAC | |
| NM_ | 692- | cscsuca(Ghd)CfcUfAfC | 4187 | VPusAfsaagAfaAfUfcg | 4521 | TGCCTCAG | 4855 | CCUCAGC | 5189 | AAAAGAAA | 5523 | CCUCAGC | 5857 | UAAAGAAA | 6191 |
| 009125.2 | 714 | fgauuucuuuaL96 | | uaGfgCfugaggscsa | | CCTACGAT | | CUACGAU | | UCGUAGGC | | CUACGAU | | UCGUAGGC | |
| | | | | | | TTCTTTT | | UUCUUUU | | UGAGGCA | | UUCUUUA | | UGAGGCA | |
| NM_ | 693- | csuscag(Chd)CfuAfCfG | 4188 | VPusAfsaaaGfaAfAfuc | 4522 | GCCTCAGC | 4856 | CUCAGCC | 5190 | CAAAAGAA | 5524 | CUCAGCC | 5858 | UAAAAGAA | 6192 |
| 009125.2 | 715 | fauuucuuuuaL96 | | guAfgGfcugagsgsc | | CTACGATT | | UACGAUU | | AUCGUAGG | | UACGAUU | | AUCGUAGG | |
| | | | | | | TCTTTTG | | UCUUUUG | | CUGAGGC | | UCUUUUA | | CUGAGGC | |
| NM_ | 694- | uscsagc(Chd)UfaCfGfA | 4189 | VPusCfsaaaAfgAfAfau | 4523 | CCTCAGCC | 4857 | UCAGCCU | 5191 | UCAAAAGA | 5525 | UCAGCCU | 5859 | UCAAAAGA | 6193 |
| 009125.2 | 716 | fuuucuuuugaL96 | | cgUfaGfgcugasgsg | | TACGATTT | | ACGAUUU | | AAUCGUAG | | ACGAUUU | | AAUCGUAG | |
| | | | | | | CTTTTGA | | CUUUUGA | | GCUGAGG | | CUUUUGA | | GCUGAGG | |
| NM_ | 733- | gsasgga(Uhd)GfgUfUfC | 4190 | VPusUfsaagUfaUfAfug | 4524 | GTGAGGAT | 4858 | GAGGAUG | 5192 | GUAAGUAU | 5526 | GAGGAUG | 5860 | UUAAGUAU | 6194 |
| 009125.2 | 755 | fauauacuuaaL96 | | aaCfcAfuccucsasc | | GGTTCATA | | GUUCAUA | | AUGAACCA | | GUUCAUA | | AUGAACCA | |
| | | | | | | TACTTAC | | UACUUAC | | UCCUCAC | | UACUUAA | | UCCUCAC | |
| NM_ | 733- | gsasgga(Uhd)GfgUfUfC | 4191 | VPusUfsaagUfaUfAfug | 4525 | ATGAGGAT | 4859 | GAGGAUG | 5193 | AUAAGUAU | 5527 | GAGGAUG | 5861 | UUAAGUAU | 6195 |
| 009125.2 | 755 | fauauacuuaaL96 | | aaCfcAfuccucsasc | | GGTTCATA | | GUUCAUA | | AUGAACCA | | GUUCAUA | | AUGAACCA | |
| | | | | | | TACTTAC | | UACUUAU | | UCCUCAC | | UACUUAA | | UCCUCAC | |
| NM_ | 734- | asgsgau(Ghd)GfuUfCfA | 4192 | VPusGfsuaaGfuAfUfau | 4526 | TGAGGATG | 4860 | AGGAUGG | 5194 | CGUAAGUA | 5528 | AGGAUGG | 5862 | UGUAAGUA | 6196 |
| 009125.2 | 756 | fuauacuuacaL96 | | gaAfcCfauccuscsa | | GTTCATAT | | UUCAUAU | | UAUGAACC | | UUCAUAU | | UAUGAACC | |
| | | | | | | ACTTACG | | ACUUACG | | AUCCUCA | | ACUUACA | | AUCCUCA | |
| NM_ | 771- | asasugu(Ghd)AfaGfUfA | 4193 | VPusUfsuucAfcUfUfgu | 4527 | GAAATGTG | 4861 | AAUGUGA | 5195 | UUUUCACU | 5529 | AAUGUGA | 5863 | UUUUCACU | 6197 |
| 009125.2 | 793 | fcaagugaaaaL96 | | acUfuCfacauususc | | AAGTACAA | | AGUACAA | | UGUACUUC | | AGUACAA | | UGUACUUC | |
| | | | | | | GTGAAAA | | GUGAAAA | | ACAUUUC | | GUGAAAA | | ACAUUUC | |
| NM_ | 771- | asasugu(Ghd)AfaGfUfA | 4194 | VPusUfsuucAfcUfUfgu | 4528 | CAAATGTG | 4862 | AAUGUGA | 5196 | UUUUCACU | 5530 | AAUGUGA | 5864 | UUUUCACU | 6198 |
| 009125.2 | 793 | fcaagugaaaaL96 | | acUfuCfacauususc | | AAGTACAA | | AGUACAA | | UGUACUUC | | AGUACAA | | UGUACUUC | |
| | | | | | | GTGAAAA | | GUGAAAA | | ACAUUUC | | GUGAAAA | | ACAUUUC | |
| NM_ | 774- | gsusgaa(Ghd)UfaCfAfA | 4195 | VPusGfsuuuUfuCfAfcu | 4529 | ATGTGAAG | 4863 | GUGAAGU | 5197 | CGUUUUUC | 5531 | GUGAAGU | 5865 | UGUUUUUC | 6199 |
| 009125.2 | 796 | fgugaaaaacaL96 | | ugUfaCfuucacsasu | | TACAAGTG | | ACAAGUG | | ACUUGUAC | | ACAAGUG | | ACUUGUAC | |
| | | | | | | AAAAACG | | AAAAACG | | UUCACAU | | AAAAACA | | UUCACAU | |
| NM_ | 807- | asasgga(Ghd)UfuUfUfU | 4196 | VPusGfsuauGfuUfUfua | 4530 | TGAAGGAG | 4864 | AAGGAGU | 5198 | UGUAUGUU | 5532 | AAGGAGU | 5866 | UGUAUGUU | 6200 |
| 009125.2 | 829 | faaaacauacaL96 | | aaAfaCfuccuuscsa | | TTTTTAAA | | UUUUAAA | | UUAAAAAC | | UUUUAAA | | UUAAAAAC | |
| | | | | | | ACATACA | | ACAUACA | | UCCUUCA | | ACAUACA | | UCCUUCA | |
| NM_ | 808- | asgsgag(Uhd)UfuUfUfA | 4197 | VPusUfsguaUfgUfUfu | 4531 | GAAGGAGT | 4865 | AGGAGUU | 5199 | CUGUAUGU | 5533 | AGGAGUU | 5867 | UUGUAUGU | 6201 |
| 009125.2 | 830 | faaacauacaaL96 | | uaaAfaAfcuccususc | | TTTTAAAA | | UUUAAAA | | UUUAAAAA | | UUUAAAA | | UUUAAAAA | |
| | | | | | | CATACAG | | CAUACAG | | CUCCUUC | | CAUACAA | | CUCCUUC | |
| NM_ | 819- | asasaca(Uhd)AfcAfGfU | 4198 | VPusAfscacUfuAfGfga | 4532 | TAAAACAT | 4866 | AAACAUA | 5200 | CACACUUA | 5534 | AAACAUA | 5868 | UACACUUA | 6202 |
| 009125.2 | 841 | fccuaaguguaL96 | | cuGfuAfuguuususa | | ACAGTCCT | | CAGUCCU | | GGACUGUA | | CAGUCCU | | GGACUGUA | |
| | | | | | | AAGTGTG | | AAGUGUG | | UGUUUUA | | AAGUGUA | | UGUUUUA | |
| NM_ | 820- | asascau(Ahd)CfaGfUfC | 4199 | VPusCfsacaCfuUfAfgg | 4533 | AAAACATA | 4867 | AACAUAC | 5201 | UCACACUU | 5535 | AACAUAC | 5869 | UCACACUU | 6203 |
| 009125.2 | 842 | fcuaagugugaL96 | | acUfgUfauguususu | | CAGTCCTA | | AGUCCUA | | AGGACUGU | | AGUCCUA | | AGGACUGU | |
| | | | | | | AGTGTGA | | AGUGUGA | | AUGUUUU | | AGUGUGA | | AUGUUUU | |
| NM_ | 821- | ascsaua(Chd)AfgUfCfC | 4200 | VPusUfscacAfcUfUfag | 4534 | AAACATAC | 4868 | ACAUACA | 5202 | GUCACACU | 5536 | ACAUACA | 5870 | UUCACACU | 6204 |
| 009125.2 | 843 | fuaagugugaaL96 | | gaCfuGfuaugususu | | AGTCCTAA | | GUCCUAA | | UAGGACUG | | GUCCUAA | | UAGGACUG | |
| | | | | | | GTGTGAC | | GUGUGAC | | UAUGUUU | | GUGUGAA | | UAUGUUU | |
| NM_ | 854- | gscsugc(Ahd)CfaUfGfA | 4201 | VPusGfsuacUfuUfUfcu | 4535 | ATGCTGCA | 4869 | GCUGCAC | 5203 | UGUACUUU | 5537 | GCUGCAC | 5871 | UGUACUUU | 6205 |
| 009125.2 | 876 | fgaaaaguacaL96 | | caUfgUfgcagcsasu | | CATGAGAA | | AUGAGAA | | UCUCAUGU | | AUGAGAA | | UCUCAUGU | |
| | | | | | | AAGTACA | | AAGUACA | | GCAGCAU | | AAGUACA | | GCAGCAU | |
| NM_ | 855- | csusgca(Chd)AfuGfAfG | 4202 | VPusUfsguaCfuUfUfuc | 4536 | TGCTGCAC | 4870 | CUGCACA | 5204 | CUGUACUU | 5538 | CUGCACA | 5872 | UUGUACUU | 6206 |
| 009125.2 | 877 | faaaaguacaaL96 | | ucAfuGfugcagscsa | | ATGAGAAA | | UGAGAAA | | UUCUCAUG | | UGAGAAA | | UUCUCAUG | |
| | | | | | | AGTACAG | | AGUACAG | | UGCAGCA | | AGUACAA | | UGCAGCA | |
| NM_ | 908- | asusgga(Ghd)AfgUfGfU | 4203 | VPusUfsugaAfcAfAfaa | 4537 | TAATGGAG | 4871 | AUGGAGA | 5205 | UUUGAACA | 5539 | AUGGAGA | 5873 | UUUGAACA | 6207 |
| 009125.2 | 930 | fuuuguucaaaL96 | | caCfuCfuccaususa | | AGTGTTTT | | GUGUUUU | | AAACACUC | | GUGUUUU | | AAACACUC | |
| | | | | | | GTTCAAA | | GUUCAAA | | UCCAUUA | | GUUCAAA | | UCCAUUA | |
| NM_ | 910- | gsgsaga(Ghd)UfgUfUfU | 4204 | VPusAfsuuuGfaAfCfaa | 4538 | ATGGAGAG | 4872 | GGAGAGU | 5206 | CAUUUGAA | 5540 | GGAGAGU | 5874 | UAUUUGAA | 6208 |
| 009125.2 | 932 | fuguucaaauaL96 | | aaCfaCfucuccsasu | | TGTTTTGTT | | GUUUUGU | | CAAAACAC | | GUUUUGU | | CAAAACAC | |
| | | | | | | CAAATG | | UCAAAUG | | UCUCCAU | | UCAAAUA | | UCUCCAU | |
| NM_ | 919- | ususugu(Uhd)CfaAfAfU | 4205 | VPusAfsgucUfgAfGfca | 4539 | GTTTTGTTC | 4873 | UUUGUUC | 5207 | AAGUCUGA | 5541 | UUUGUUC | 5875 | UAGUCUGA | 6209 |
| 009125.2 | 941 | fgcucagacuaL96 | | uuUfgAfacaaasasc | | AAATGCTC | | AAAUGCU | | GCAUUUGA | | AAAUGCU | | GCAUUUGA | |
| | | | | | | AGACTT | | CAGACUU | | ACAAAAC | | CAGACUA | | ACAAAAC | |
| NM_ | 921- | usgsuuc(Ahd)AfaUfGfC | 4206 | VPusGfsaagUfcUfGfag | 4540 | TTTGTTCA | 4874 | UGUUCAA | 5208 | CGAAGUCU | 5542 | UGUUCAA | 5876 | UGAAGUCU | 6210 |
| 009125.2 | 943 | fucagacuucaL96 | | caUfuUfgaacasasa | | AATGCTCA | | AUGCUCA | | GAGCAUUU | | AUGCUCA | | GAGCAUUU | |
| | | | | | | GACTTCG | | GACUUCG | | GAACAAA | | GACUUCA | | GAACAAA | |
| NM_ | 922- | gsusuca(Ahd)AfuGfCfU | 4207 | VPusCfsgaaGfuCfUfga | 4541 | TTGTTCAA | 4875 | GUUCAAA | 5209 | ACGAAGUC | 5543 | GUUCAAA | 5877 | UCGAAGUC | 6211 |
| 009125.2 | 944 | fcagacuucgaL96 | | gcAfuUfugaacsasa | | ATGCTCAG | | UGCUCAG | | UGAGCAUU | | UGCUCAG | | UGAGCAUU | |
| | | | | | | ACTTCGT | | ACUUCGU | | UGAACAA | | ACUUCGA | | UGAACAA | |
| NM_ | 923- | ususcaa(Ahd)UfgCfUfC | 4208 | VPusAfscgaAfgUfCfug | 4542 | TGTTCAAA | 4876 | UUCAAAU | 5210 | AACGAAGU | 5544 | UUCAAAU | 5878 | UACGAAGU | 6212 |
| 009125.2 | 945 | fagacuucguaL96 | | agCfaUfuugaascsa | | TGCTCAGA | | GCUCAGA | | CUGAGCAU | | GCUCAGA | | CUGAGCAU | |
| | | | | | | CTTCGTT | | CUUCGUU | | UUGAACA | | CUUCGUA | | UUGAACA | |
| NM_ | 924- | uscsaaa(Uhd)GfcUfCfA | 4209 | VPusAfsacgAfaGfUfcu | 4543 | GTTCAAAT | 4877 | UCAAAUG | 5211 | CAACGAAG | 5545 | UCAAAUG | 5879 | UAACGAAG | 6213 |
| 009125.2 | 946 | fgacuucguuaL96 | | gaGfcAfuuugasasc | | GCTCAGAC | | CUCAGAC | | UCUGAGCA | | CUCAGAC | | UCUGAGCA | |
| | | | | | | TTCGTTG | | UUCGUUG | | UUUGAAC | | UUCGUUA | | UUUGAAC | |
| NM_ | 925- | csasaau(Ghd)CfuCfAfG | 4210 | VPusCfsaacGfaAfGfuc | 4544 | TTCAAATG | 4878 | CAAAUGC | 5212 | ACAACGAA | 5546 | CAAAUGC | 5880 | UCAACGAA | 6214 |
| 009125.2 | 947 | facuucguugaL96 | | ugAfgCfauuugsasa | | CTCAGACT | | UCAGACU | | GUCUGAGC | | UCAGACU | | GUCUGAGC | |
| | | | | | | TCGTTGT | | UCGUUGU | | AUUUGAA | | UCGUUGA | | AUUUGAA | |
| NM_ | 926- | asasaug(Chd)UfcAfGfA | 4211 | VPusAfscaaCfgAfAfgu | 4545 | TCAAATGC | 4879 | AAAUGCU | 5213 | CACAACGA | 5547 | AAAUGCU | 5881 | UACAACGA | 6215 |
| 009125.2 | 948 | fcuucguuguaL96 | | cuGfaGfcauuusgsa | | TCAGACTT | | CAGACUU | | AGUCUGAG | | CAGACUU | | AGUCUGAG | |
| | | | | | | CGTTGTG | | CGUUGUG | | CAUUUGA | | CGUUGUA | | CAUUUGA | |
| NM_ | 927- | asasugc(Uhd)CfaGfAfC | 4212 | VPusCfsacaAfcGfAfag | 4546 | CAAATGCT | 4880 | AAUGCUC | 5214 | CCACAACG | 5548 | AAUGCUC | 5882 | UCACAACG | 6216 |
| 009125.2 | 949 | fuucguugugaL96 | | ucUfgAfgcauususg | | CAGACTTC | | AGACUUC | | AAGUCUGA | | AGACUUC | | AAGUCUGA | |
| | | | | | | GTTGTGG | | GUUGUGG | | GCAUUUG | | GUUGUGA | | GCAUUUG | |
| NM_ | 1131- | ascsaug(Uhd)UfuCfGfA | 4213 | VPusUfsucaUfuAfUfau | 4547 | TGACATGT | 4881 | ACAUGUU | 5215 | CUUCAUUA | 5549 | ACAUGUU | 5883 | UUUCAUUA | 6217 |
| 009125.2 | 1153 | fuauaaugaaaL96 | | cgAfaAfcauguscsa | | TTCGATAT | | UCGAUAU | | UAUCGAAA | | UCGAUAU | | UAUCGAAA | |
| | | | | | | AATGAAG | | AAUGAAG | | CAUGUCA | | AAUGAAA | | CAUGUCA | |
| NM_ | 1186- | ususuau(Chd)UfuCfAfU | 4214 | VPusGfsaacCfgUfAfua | 4548 | AGTTTATC | 4882 | UUUAUCU | 5216 | GGAACCGU | 5550 | UUUAUCU | 5884 | UGAACCGU | 6218 |
| 009125.2 | 1208 | fauacgguucaL96 | | ugAfaGfauaaascsu | | TTCATATA | | UCAUAUA | | AUAUGAAG | | UCAUAUA | | AUAUGAAG | |
| | | | | | | CGGTTCC | | CGGUUCC | | AUAAACU | | CGGUUCA | | AUAAACU | |
| NM_ | 1214- | asgsgga(Chd)AfaCfUfC | 4215 | VPusAfsauuCfuUfCfug | 4549 | AAAGGGAC | 4883 | AGGGACA | 5217 | AAAUUCUU | 5551 | AGGGACA | 5885 | UAAUUCUU | 6219 |
| 009125.2 | 1236 | fagaagaauuaL96 | | agUfuGfucccususu | | AACTCAGA | | ACUCAGA | | CUGAGUUG | | ACUCAGA | | CUGAGUUG | |
| | | | | | | AGAATTT | | AGAAUUU | | UCCCUUU | | AGAAUUA | | UCCCUUU | |
| NM_ | 1215- | gsgsgac(Ahd)AfcUfCfA | 4216 | VPusAfsaauUfcUfUfcu | 4550 | AAGGGACA | 4884 | GGGACAA | 5218 | GAAAUUCU | 5552 | GGGACAA | 5886 | UAAAUUCU | 6220 |
| 009125.2 | 1237 | fgaagaauuuaL96 | | gaGfuUfgucccsusu | | ACTCAGAA | | CUCAGAA | | UCUGAGUU | | CUCAGAA | | UCUGAGUU | |
| | | | | | | GAATTTC | | GAAUUUC | | GUCCCUU | | GAAUUUA | | GUCCCUU | |
| NM_ | 1216- | gsgsaca(Ahd)CfuCfAfG | 4217 | VPusGfsaaaUfuCfUfuc | 4551 | AGGGACAA | 4885 | GGACAAC | 5219 | AGAAAUUC | 5553 | GGACAAC | 5887 | UGAAAUUC | 6221 |
| 009125.2 | 1238 | faagaauuucaL96 | | ugAfgUfuguccscsu | | CTCAGAAG | | UCAGAAG | | UUCUGAGU | | UCAGAAG | | UUCUGAGU | |
| | | | | | | AATTTCT | | AAUUUCU | | UGUCCCU | | AAUUUCA | | UGUCCCU | |
| NM_ | 1217- | gsascaa(Chd)UfcAfGfA | 4218 | VPusAfsgaaAfuUfCfuu | 4552 | GGGACAAC | 4886 | GACAACU | 5220 | AAGAAAUU | 5554 | GACAACU | 5888 | UAGAAAUU | 6222 |
| 009125.2 | 1239 | fagaauuucuaL96 | | cuGfaGfuugucscsc | | TCAGAAGA | | CAGAAGA | | CUUCUGAG | | CAGAAGA | | CUUCUGAG | |
| | | | | | | ATTTCTT | | AUUUCUU | | UUGUCCC | | AUUUCUA | | UUGUCCC | |
| NM_ | 1516- | usgscuu(Chd)UfcAfCfA | 4219 | VPusAfsaucUfgAfAfgu | 4553 | GCTGCTTC | 4887 | UGCUUCU | 5221 | AAAUCUGA | 5555 | UGCUUCU | 5889 | UAAUCUGA | 6223 |
| 009125.2 | 1538 | fcuucagauuaL96 | | guGfaGfaagcasgsc | | TCACACTT | | CACACUU | | AGUGUGAG | | CACACUU | | AGUGUGAG | |
| | | | | | | CAGATTT | | CAGAUUU | | AAGCAGC | | CAGAUUA | | AAGCAGC | |
| NM_ | 1517- | gscsuuc(Uhd)CfaCfAfC | 4220 | VPusAfsaauCfuGfAfag | 4554 | CTGCTTCTC | 4888 | GCUUCUC | 5222 | GAAAUCUG | 5556 | GCUUCUC | 5890 | UAAAUCUG | 6224 |
| 009125.2 | 1539 | fuucagauuuaL96 | | ugUfgAfgaagcsasg | | ACACTTCA | | ACACUUC | | AAGUGUGA | | ACACUUC | | AAGUGUGA | |
| | | | | | | GATTTC | | AGAUUUC | | GAAGCAG | | AGAUUUA | | GAAGCAG | |
| NM_ | 1518- | csusucu(Chd)AfcAfCfU | 4221 | VPusGfsaaaUfcUfGfaa | 4555 | TGCTTCTC | 4889 | CUUCUCA | 5223 | UGAAAUCU | 5557 | CUUCUCA | 5891 | UGAAAUCU | 6225 |
| 009125.2 | 1540 | fucagauuucaL96 | | guGfuGfagaagscsa | | ACACTTCA | | CACUUCA | | GAAGUGUG | | CACUUCA | | GAAGUGUG | |
| | | | | | | GATTTCA | | GAUUUCA | | AGAAGCA | | GAUUUCA | | AGAAGCA | |
| NM_ | 1518- | csusucu(Chd)AfcAfCfU | 4222 | VPusGfsaaaUfcUfGfaa | 4556 | CACTTCTC | 4890 | CUUCUCA | 5224 | UGAAAUCU | 5558 | CUUCUCA | 5892 | UGAAAUCU | 6226 |
| 009125.2 | 1540 | fucagauuucaL96 | | guGfuGfagaagscsa | | ACACTTCA | | CACUUCA | | GAAGUGUG | | CACUUCA | | GAAGUGUG | |
| | | | | | | GATTTCA | | GAUUUCA | | AGAAGCA | | GAUUUCA | | AGAAGCA | |
| NM_ | 1519- | ususcuc(Ahd)CfaCfUfU | 4223 | VPusUfsgaaAfuCfUfga | 4557 | GCTTCTCA | 4891 | UUCUCAC | 5225 | UUGAAAUC | 5559 | UUCUCAC | 5893 | UUGAAAUC | 6227 |
| 009125.2 | 1541 | fcagauuucaaL96 | | agUfgUfgagaasgsc | | CACTTCAG | | ACUUCAG | | UGAAGUGU | | ACUUCAG | | UGAAGUGU | |
| | | | | | | ATTTCAA | | AUUUCAA | | GAGAAGC | | AUUUCAA | | GAGAAGC | |
| NM_ | 1519- | ususcuc(Ahd)CfaCfUfU | 4224 | VPusUfsgaaAfuCfUfga | 4558 | ACTTCTCA | 4892 | UUCUCAC | 5226 | UUGAAATC | 5560 | UUCUCAC | 5894 | UUGAAAUC | 6228 |
| 009125.2 | 1541 | fcagauuucaaL96 | | agUfgUfgagaasgsc | | CACTTCAG | | ACUUCAG | | UGAAGUGU | | ACUUCAG | | UGAAGUGU | |
| | | | | | | ATTTCAA | | AUUUCAA | | GAGAAGC | | AUUUCAA | | GAGAAGC | |
| NM_ | 1553- | uscsaga(Chd)CfaAfAfG | 4225 | VPusUfsuaaCfuAfCfuc | 4559 | GCTCAGAC | 4893 | UCAGACC | 5227 | AUUAACUA | 5561 | UCAGACC | 5895 | UUUAACUA | 6229 |
| 009125.2 | 1575 | faguaguuaaaL96 | | uuUfgGfucugasgsc | | CAAAGAGT | | AAAGAGU | | CUCUUUGG | | AAAGAGU | | CUCUUUGG | |
| | | | | | | AGTTAAT | | AGUUAAU | | UCUGAGC | | AGUUAAA | | UCUGAGC | |
| NM_ | 1553- | uscsaga(Chd)CfaAfAfG | 4226 | VPusUfsuaaCfuAfCfuc | 4560 | GTTCAGAC | 4894 | UCAGACC | 5228 | AUUAACTA | 5562 | UCAGACC | 5896 | UUUAACUA | 6230 |
| 009125.2 | 1575 | faguaguuaaaL96 | | uuUfgGfucugasgsc | | CAAAGAGT | | AAAGAGU | | CUCUUUGG | | AAAGAGU | | CUCUUUGG | |
| | | | | | | AGTTAAT | | AGUUAAU | | UCUGAGC | | AGUUAAA | | UCUGAGC | |
| NM_ | 1554- | csasgac(Chd)AfaAfGfA | 4227 | VPusAfsuuaAfcUfAfcu | 4561 | CTCAGACC | 4895 | CAGACCA | 5229 | CAUUAACU | 5563 | CAGACCA | 5897 | UAUUAACU | 6231 |
| 009125.2 | 1576 | fguaguuaauaL96 | | cuUfuGfgucugsasg | | AAAGAGTA | | AAGAGUA | | ACUCUUUG | | AAGAGUA | | ACUCUUUG | |
| | | | | | | GTTAATG | | GUUAAUG | | GUCUGAG | | GUUAAUA | | GUCUGAG | |
| NM_ | 1554- | csasgac(Chd)AfaAfGfA | 4228 | VPusAfsuuaAfcUfAfcu | 4562 | TTCAGACC | 4896 | CAGACCA | 5230 | AAUUAACU | 5564 | CAGACCA | 5898 | UAUUAACU | 6232 |
| 009125.2 | 1576 | fguaguuaauaL96 | | cuUfuGfgucugsasg | | AAAGAGTA | | AAGAGUA | | ACUCUUUG | | AAGAGUA | | ACUCUUUG | |
| | | | | | | GTTAATG | | GUUAAUU | | GUCUGAG | | GUUAAUA | | GUCUGAG | |
| NM_ | 1872- | usasgaa(Uhd)UfuGfUfA | 4229 | VPusAfsuugUfgGfGfa | 4563 | CCTAGAAT | 4897 | UAGAAUU | 5231 | GAUUGUGG | 5565 | UAGAAUU | 5899 | UAUUGUGG | 6233 |
| 009125.2 | 1894 | fucccacaauaL96 | | uacAfaAfuucuasgsg | | TTGTATCC | | UGUAUCC | | GAUACAAA | | UGUAUCC | | GAUACAAA | |
| | | | | | | CACAATC | | CACAAUC | | UUCUAGG | | CACAAUA | | UUCUAGG | |
| NM_ | 1873- | asgsaau(Uhd)UfgUfAfU | 4230 | VPusGfsauuGfuGfGfga | 4564 | CTAGAATT | 4898 | AGAAUUU | 5232 | GGAUUGUG | 5566 | AGAAUUU | 5900 | UGAUUGUG | 6234 |
| 009125.2 | 1895 | fcccacaaucaL96 | | uaCfaAfauucusasg | | TGTATCCC | | GUAUCCC | | GGAUACAA | | GUAUCCC | | GGAUACAA | |
| | | | | | | ACAATCC | | ACAAUCC | | AUUCUAG | | ACAAUCA | | AUUCUAG | |
| NM_ | 1874- | gsasauu(Uhd)GfuAfUfC | 4231 | VPusGfsgauUfgUfGfg | 4565 | TAGAATTT | 4899 | GAAUUUG | 5233 | GGGAUUGU | 5567 | GAAUUUG | 5901 | UGGAUUGU | 6235 |
| 009125.2 | 1896 | fccacaauccaL96 | | gauAfcAfaauucsusa | | GTATCCCA | | UAUCCCA | | GGGAUACA | | UAUCCCA | | GGGAUACA | |
| | | | | | | CAATCCC | | CAAUCCC | | AAUUCUA | | CAAUCCA | | AAUUCUA | |
| NM_ | 2238- | gsusgaa(Ahd)CfaUfCfA | 4232 | VPusAfsaagCfuAfGfgu | 4566 | AAGTGAAA | 4900 | GUGAAAC | 5234 | AAAAGCUA | 5568 | GUGAAAC | 5902 | UAAAGCUA | 6236 |
| 009125.2 | 2260 | fccuagcuuuaL96 | | gaUfgUfuucacsusu | | CATCACCT | | AUCACCU | | GGUGAUGU | | AUCACCU | | GGUGAUGU | |
| | | | | | | AGCTTTT | | AGCUUUU | | UUCACUU | | AGCUUUA | | UUCACUU | |
| NM_ | 2239- | usgsaaa(Chd)AfuCfAfC | 4233 | VPusAfsaaaGfcUfAfgg | 4567 | AGTGAAAC | 4901 | UGAAACA | 5235 | GAAAAGCU | 5569 | UGAAACA | 5903 | UAAAAGCU | 6237 |
| 009125.2 | 2261 | fcuagcuuuuaL96 | | ugAfuGfuuucascsu | | ATCACCTA | | UCACCUA | | AGGUGAUG | | UCACCUA | | AGGUGAUG | |
| | | | | | | GCTTTTC | | GCUUUUC | | UUUCACU | | GCUUUUA | | UUUCACU | |
| NM_ | 2240- | gsasaac(Ahd)UfcAfCfC | 4234 | VPusGfsaaaAfgCfUfag | 4568 | GTGAAACA | 4902 | GAAACAU | 5236 | UGAAAAGC | 5570 | GAAACAU | 5904 | UGAAAAGC | 6238 |
| 009125.2 | 2262 | fuagcuuuucaL96 | | guGfaUfguuucsasc | | TCACCTAG | | CACCUAG | | UAGGUGAU | | CACCUAG | | UAGGUGAU | |
| | | | | | | CTTTTCA | | CUUUUCA | | GUUUCAC | | CUUUUCA | | GUUUCAC | |
| NM_ | 2241- | asasaca(Uhd)CfaCfCfU | 4235 | VPusUfsgaaAfaGfCfua | 4569 | TGAAACAT | 4903 | AAACAUC | 5237 | UUGAAAAG | 5571 | AAACAUC | 5905 | UUGAAAAG | 6239 |
| 009125.2 | 2263 | fagcuuuucaaL96 | | ggUfgAfuguuuscsa | | CACCTAGC | | ACCUAGC | | CUAGGUGA | | ACCUAGC | | CUAGGUGA | |
| | | | | | | TTTTCAA | | UUUUCAA | | UGUUUCA | | UUUUCAA | | UGUUUCA | |
| NM_ | 2242- | asascau(Chd)AfcCfUfA | 4236 | VPusUfsugaAfaAfGfcu | 4570 | GAAACATC | 4904 | AACAUCA | 5238 | UUUGAAAA | 5572 | AACAUCA | 5906 | UUUGAAAA | 6240 |
| 009125.2 | 2264 | fgcuuuucaaaL96 | | agGfuGfauguususc | | ACCTAGCT | | CCUAGCU | | GCUAGGUG | | CCUAGCU | | GCUAGGUG | |
| | | | | | | TTTCAAA | | UUUCAAA | | AUGUUUC | | UUUCAAA | | AUGUUUC | |
| NM_ | 2243- | ascsauc(Ahd)CfcUfAfG | 4237 | VPusUfsuugAfaAfAfgc | 4571 | AAACATCA | 4905 | ACAUCAC | 5239 | UUUUGAAA | 5573 | ACAUCAC | 5907 | UUUUGAAA | 6241 |
| 009125.2 | 2265 | fcuuuucaaaaL96 | | uaGfgUfgaugususu | | CCTAGCTT | | CUAGCUU | | AGCUAGGU | | CUAGCUU | | AGCUAGGU | |
| | | | | | | TTCAAAA | | UUCAAAA | | GAUGUUU | | UUCAAAA | | GAUGUUU | |
| NM_ | 2244- | csasuca(Chd)CfuAfGfC | 4238 | VPusUfsuuuGfaAfAfag | 4572 | AACATCAC | 4906 | CAUCACC | 5240 | CUUUUGAA | 5574 | CAUCACC | 5908 | UUUUUGAA | 6242 |
| 009125.2 | 2266 | fuuuucaaaaaL96 | | cuAfgGfugaugsusu | | CTAGCTTTT | | UAGCUUU | | AAGCUAGG | | UAGCUUU | | AAGCUAGG | |
| | | | | | | CAAAAG | | UCAAAAG | | UGAUGUU | | UCAAAAA | | UGAUGUU | |
| NM_ | 2245- | asuscac(Chd)UfaGfCfU | 4239 | VPusCfsuuuUfgAfAfaa | 4573 | ACATCACC | 4907 | AUCACCU | 5241 | GCUUUUGA | 5575 | AUCACCU | 5909 | UCUUUUGA | 6243 |
| 009125.2 | 2267 | fuuucaaaagaL96 | | gcUfaGfgugausgsu | | TAGCTTTTC | | AGCUUUU | | AAAGCUAG | | AGCUUUU | | AAAGCUAG | |
| | | | | | | AAAAGC | | CAAAAGC | | GUGAUGU | | CAAAAGA | | GUGAUGU | |
| NM_ | 2246- | uscsacc(Uhd)AfgCfUfU | 4240 | VPusGfscuuUfuGfAfaa | 4574 | CATCACCT | 4908 | UCACCUA | 5242 | AGCUUUUG | 5576 | UCACCUA | 5910 | UGCUUUUG | 6244 |
| 009125.2 | 2268 | fuucaaaagcaL96 | | agCfuAfggugasusg | | AGCTTTTC | | GCUUUUC | | AAAAGCUA | | GCUUUUC | | AAAAGCUA | |
| | | | | | | AAAAGCT | | AAAAGCU | | GGUGAUG | | AAAAGCA | | GGUGAUG | |
| NM_ | 2247- | csasccu(Ahd)GfcUfUfU | 4241 | VPusAfsgcuUfuUfGfaa | 4575 | ATCACCTA | 4909 | CACCUAG | 5243 | CAGCUUUU | 5577 | CACCUAG | 5911 | UAGCUUUU | 6245 |
| 009125.2 | 2269 | fucaaaagcuaL96 | | aaGfcUfaggugsasu | | GCTTTTCA | | CUUUUCA | | GAAAAGCU | | CUUUUCA | | GAAAAGCU | |
| | | | | | | AAAGCTG | | AAAGCUG | | AGGUGAU | | AAAGCUA | | AGGUGAU | |
| NM_ | 2248- | ascscua(Ghd)CfuUfUfU | 4242 | VPusCfsagcUfuUfUfga | 4576 | TCACCTAG | 4910 | ACCUAGC | 5244 | UCAGCUUU | 5578 | ACCUAGC | 5912 | UCAGCUUU | 6246 |
| 009125.2 | 2270 | fcaaaagcugaL96 | | aaAfgCfuaggusgsa | | CTTTTCAA | | UUUUCAA | | UGAAAAGC | | UUUUCAA | | UGAAAAGC | |
| | | | | | | AAGCTGA | | AAGCUGA | | UAGGUGA | | AAGCUGA | | UAGGUGA | |
| NM_ | 2249- | cscsuag(Chd)UfuUfUfC | 4243 | VPusUfscagCfuUfUfug | 4577 | CACCTAGC | 4911 | CCUAGCU | 5245 | GUCAGCUU | 5579 | CCUAGCU | 5913 | UUCAGCUU | 6247 |
| 009125.2 | 2271 | faaaagcugaaL96 | | aaAfaGfcuaggsusg | | TTTTCAAA | | UUUCAAA | | UUGAAAAG | | UUUCAAA | | UUGAAAAG | |
| | | | | | | AGCTGAC | | AGCUGAC | | CUAGGUG | | AGCUGAA | | CUAGGUG | |
| NM_ | 2364- | csasucu(Ghd)AfaUfCfU | 4244 | VPusUfsugaUfcCfAfua | 4578 | TACATCTG | 4912 | CAUCUGA | 5246 | GUUGAUCC | 5580 | CAUCUGA | 5914 | UUUGAUCC | 6248 |
| 009125.2 | 2386 | fauggaucaaaL96 | | gaUfuCfagaugsusa | | AATCTATG | | AUCUAUG | | AUAGAUUC | | AUCUAUG | | AUAGAUUC | |
| | | | | | | GATCAAC | | GAUCAAC | | AGAUGUA | | GAUCAAA | | AGAUGUA | |
| NM_ | 2365- | asuscug(Ahd)AfuCfUfA | 4245 | VPusGfsuugAfuCfCfau | 4579 | ACATCTGA | 4913 | AUCUGAA | 5247 | AGUUGAUC | 5581 | AUCUGAA | 5915 | UGUUGAUC | 6249 |
| 009125.2 | 2387 | fuggaucaacaL96 | | agAfuUfcagausgsu | | ATCTATGG | | UCUAUGG | | CAUAGAUU | | UCUAUGG | | CAUAGAUU | |
| | | | | | | ATCAACT | | AUCAACU | | CAGAUGU | | AUCAACA | | CAGAUGU | |
| NM_ | 2366- | uscsuga(Ahd)UfcUfAfU | 4246 | VPusAfsguuGfaUfCfca | 4580 | CATCTGAA | 4914 | UCUGAAU | 5248 | UAGUUGAU | 5582 | UCUGAAU | 5916 | UAGUUGAU | 6250 |
| 009125.2 | 2388 | fggaucaacuaL96 | | uaGfaUfucagasusg | | TCTATGGA | | CUAUGGA | | CCAUAGAU | | CUAUGGA | | CCAUAGAU | |
| | | | | | | TCAACTA | | UCAACUA | | UCAGAUG | | UCAACUA | | UCAGAUG | |
| NM_ | 2366- | uscsuga(Ahd)UfcUfAfU | 4247 | VPusAfsguuGfaUfCfca | 4581 | CTTCTGAA | 4915 | UCUGAAU | 5249 | UAGUUGAU | 5583 | UCUGAAU | 5917 | UAGUUGAU | 6251 |
| 009125.2 | 2388 | fggaucaacuaL96 | | uaGfaUfucagasusg | | TCTATGGA | | CUAUGGA | | CCAUAGAU | | CUAUGGA | | CCAUAGAU | |
| | | | | | | TCAACTA | | UCAACUA | | UCAGAUG | | UCAACUA | | UCAGAUG | |
| NM_ | 2367- | csusgaa(Uhd)CfuAfUfG | 4248 | VPusUfsaguUfgAfUfcc | 4582 | ATCTGAAT | 4916 | CUGAAUC | 5250 | GUAGUUGA | 5584 | CUGAAUC | 5918 | UUAGUUGA | 6252 |
| 009125.2 | 2389 | fgaucaacuaaL96 | | auAfgAfuucagsasu | | CTATGGAT | | UAUGGAU | | UCCAUAGA | | UAUGGAU | | UCCAUAGA | |
| | | | | | | CAACTAC | | CAACUAC | | UUCAGAU | | CAACUAA | | UUCAGAU | |
| NM_ | 2367- | csusgaa(Uhd)CfuAfUfG | 4249 | VPusUfsaguUfgAfUfcc | 4583 | TTCTGAAT | 4917 | CUGAAUC | 5251 | AUAGUUGA | 5585 | CUGAAUC | 5919 | UUAGUUGA | 6253 |
| 009125.2 | 2389 | fgaucaacuaaL96 | | auAfgAfuucagsasu | | CTATGGAT | | UAUGGAU | | UCCAUAGA | | UAUGGAU | | UCCAUAGA | |
| | | | | | | CAACTAC | | CAACUAU | | UUCAGAU | | CAACUAA | | UUCAGAU | |
| NM_ | 2371- | asuscua(Uhd)GfgAfUfC | 4250 | VPusUfsuagUfaGfUfug | 4584 | GAATCTAT | 4918 | AUCUAUG | 5252 | CUUAGUAG | 5586 | AUCUAUG | 5920 | UUUAGUAG | 6254 |
| 009125.2 | 2393 | faacuacuaaaL96 | | auCfcAfuagaususc | | GGATCAAC | | GAUCAAC | | UUGAUCCA | | GAUCAAC | | UUGAUCCA | |
| | | | | | | TACTAAG | | UACUAAG | | UAGAUUC | | UACUAAA | | UAGAUUC | |
| NM_ | 2372- | uscsuau(Ghd)GfaUfCfA | 4251 | VPusCfsuuaGfuAfGfuu | 4585 | AATCTATG | 4919 | UCUAUGG | 5253 | GCUUAGUA | 5587 | UCUAUGG | 5921 | UCUUAGUA | 6255 |
| 009125.2 | 2394 | facuacuaagaL96 | | gaUfcCfauagasusu | | GATCAACT | | AUCAACU | | GUUGAUCC | | AUCAACU | | GUUGAUCC | |
| | | | | | | ACTAAGC | | ACUAAGC | | AUAGAUU | | ACUAAGA | | AUAGAUU | |
| NM_ | 2373- | csusaug(Ghd)AfuCfAfA | 4252 | VPusGfscuuAfgUfAfg | 4586 | ATCTATGG | 4920 | CUAUGGA | 5254 | UGCUUAGU | 5588 | CUAUGGA | 5922 | UGCUUAGU | 6256 |
| 009125.2 | 2395 | fcuacuaagcaL96 | | uugAfuCfcauagsasu | | ATCAACTA | | UCAACUA | | AGUUGAUC | | UCAACUA | | AGUUGAUC | |
| | | | | | | CTAAGCA | | CUAAGCA | | CAUAGAU | | CUAAGCA | | CAUAGAU | |
| NM_ | 2374- | usasugg(Ahd)UfcAfAfC | 4253 | VPusUfsgcuUfaGfUfag | 4587 | TCTATGGA | 4921 | UAUGGAU | 5255 | UUGCUUAG | 5589 | UAUGGAU | 5923 | UUGCUUAG | 6257 |
| 009125.2 | 2396 | fuacuaagcaaL96 | | uuGfaUfccauasgsa | | TCAACTAC | | CAACUAC | | UAGUUGAU | | CAACUAC | | UAGUUGAU | |
| | | | | | | TAAGCAA | | UAAGCAA | | CCAUAGA | | UAAGCAA | | CCAUAGA | |
| NM_ | 2375- | asusgga(Uhd)CfaAfCfU | 4254 | VPusUfsugcUfuAfGfua | 4588 | CTATGGAT | 4922 | AUGGAUC | 5256 | UUUGCUUA | 5590 | AUGGAUC | 5924 | UUUGCUUA | 6258 |
| 009125.2 | 2397 | facuaagcaaaL96 | | guUfgAfuccausasg | | CAACTACT | | AACUACU | | GUAGUUGA | | AACUACU | | GUAGUUGA | |
| | | | | | | AAGCAAA | | AAGCAAA | | UCCAUAG | | AAGCAAA | | UCCAUAG | |
| NM_ | 2376- | usgsgau(Chd)AfaCfUfA | 4255 | VPusUfsuugCfuUfAfg | 4589 | TATGGATC | 4923 | UGGAUCA | 5257 | UUUUGCUU | 5591 | UGGAUCA | 5925 | UUUUGCUU | 6259 |
| 009125.2 | 2398 | fcuaagcaaaaL96 | | uagUfuGfauccasusa | | AACTACTA | | ACUACUA | | AGUAGUUG | | ACUACUA | | AGUAGUUG | |
| | | | | | | AGCAAAA | | AGCAAAA | | AUCCAUA | | AGCAAAA | | AUCCAUA | |
| NM_ | 2377- | gsgsauc(Ahd)AfcUfAfC | 4256 | VPusUfsuuuGfcUfUfag | 4590 | ATGGATCA | 4924 | GGAUCAA | 5258 | UUUUUGCU | 5592 | GGAUCAA | 5926 | UUUUUGCU | 6260 |
| 009125.2 | 2399 | fuaagcaaaaaL96 | | uaGfuUfgauccsasu | | ACTACTAA | | CUACUAA | | UAGUAGUU | | CUACUAA | | UAGUAGUU | |
| | | | | | | GCAAAAA | | GCAAAAA | | GAUCCAU | | GCAAAAA | | GAUCCAU | |
| NM_ | 2378- | gsasuca(Ahd)CfuAfCfU | 4257 | VPusUfsuuuUfgCfUfua | 4591 | TGGATCAA | 4925 | GAUCAAC | 5259 | AUUUUUGC | 5593 | GAUCAAC | 5927 | UUUUUUGC | 6261 |
| 009125.2 | 2400 | faagcaaaaaaL96 | | guAfgUfugaucscsa | | CTACTAAG | | UACUAAG | | UUAGUAGU | | UACUAAG | | UUAGUAGU | |
| | | | | | | CAAAAAT | | CAAAAAU | | UGAUCCA | | CAAAAAA | | UGAUCCA | |
| NM_ | 2403- | asasgga(Ghd)AfaAfAfG | 4258 | VPusAfsucuCfgUfGfac | 4592 | AGAAGGAG | 4926 | AAGGAGA | 5260 | AAUCUCGU | 5594 | AAGGAGA | 5928 | UAUCUCGU | 6262 |
| 009125.2 | 2425 | fucacgagauaL96 | | uuUfuCfuccuuscsu | | AAAAGTCA | | AAAGUCA | | GACUUUUC | | AAAGUCA | | GACUUUUC | |
| | | | | | | CGAGATT | | CGAGAUU | | UCCUUCU | | CGAGAUA | | UCCUUCU | |
| NM_ | 2695- | gsgsagu(Uhd)CfaAfCfC | 4259 | VPusAfsagaAfcGfAfgg | 4593 | AAGGAGTT | 4927 | GGAGUUC | 5261 | AAAGAACG | 5595 | GGAGUUC | 5929 | UAAGAACG | 6263 |
| 009125.2 | 2717 | fcucguucuuaL96 | | guUfgAfacuccsusu | | CAACCCTC | | AACCCUC | | AGGGUUGA | | AACCCUC | | AGGGUUGA | |
| | | | | | | GTTCTTT | | GUUCUUU | | ACUCCUU | | GUUCUUA | | ACUCCUU | |
| NM_ | 2698- | gsusuca(Ahd)CfcCfUfC | 4260 | VPusAfsgaaAfgAfAfcg | 4594 | GAGTTCAA | 4928 | GUUCAAC | 5262 | GAGAAAGA | 5596 | GUUCAAC | 5930 | UAGAAAGA | 6264 |
| 009125.2 | 2720 | fguucuuucuaL96 | | agGfgUfugaacsusc | | CCCTCGTT | | CCUCGUU | | ACGAGGGU | | CCUCGUU | | ACGAGGGU | |
| | | | | | | CTTTCTC | | CUUUCUC | | UGAACUC | | CUUUCUA | | UGAACUC | |
| NM_ | 2699- | ususcaa(Chd)CfcUfCfG | 4261 | VPusGfsagaAfaGfAfac | 4595 | AGTTCAAC | 4929 | UUCAACC | 5263 | AGAGAAAG | 5597 | UUCAACC | 5931 | UGAGAAAG | 6265 |
| 009125.2 | 2721 | fuucuuucucaL96 | | gaGfgGfuugaascsu | | CCTCGTTCT | | CUCGUUC | | AACGAGGG | | CUCGUUC | | AACGAGGG | |
| | | | | | | TTCTCT | | UUUCUCU | | UUGAACU | | UUUCUCA | | UUGAACU | |
| NM_ | 2700- | uscsaac(Chd)CfuCfGfU | 4262 | VPusAfsgagAfaAfGfaa | 4596 | GTTCAACC | 4930 | UCAACCC | 5264 | GAGAGAAA | 5598 | UCAACCC | 5932 | UAGAGAAA | 6266 |
| 009125.2 | 2722 | fucuuucucuaL96 | | cgAfgGfguugasasc | | CTCGTTCTT | | UCGUUCU | | GAACGAGG | | UCGUUCU | | GAACGAGG | |
| | | | | | | TCTCTC | | UUCUCUC | | GUUGAAC | | UUCUCUA | | GUUGAAC | |
| NM_ | 2701- | csasacc(Chd)UfcGfUfU | 4263 | VPusGfsagaGfaAfAfga | 4597 | TTCAACCC | 4931 | CAACCCU | 5265 | UGAGAGAA | 5599 | CAACCCU | 5933 | UGAGAGAA | 6267 |
| 009125.2 | 2723 | fcuuucucucaL96 | | acGfaGfgguugsasa | | TCGTTCTTT | | CGUUCUU | | AGAACGAG | | CGUUCUU | | AGAACGAG | |
| | | | | | | CTCTCA | | UCUCUCA | | GGUUGAA | | UCUCUCA | | GGUUGAA | |
| NM_ | 2702- | asasccc(Uhd)CfgUfUfC | 4264 | VPusUfsgagAfgAfAfag | 4598 | TCAACCCT | 4932 | AACCCUC | 5266 | CUGAGAGA | 5600 | AACCCUC | 5934 | UUGAGAGA | 6268 |
| 009125.2 | 2724 | fuuucucucaaL96 | | aaCfgAfggguusgsa | | CGTTCTTTC | | GUUCUUU | | AAGAACGA | | GUUCUUU | | AAGAACGA | |
| | | | | | | TCTCAG | | CUCUCAG | | GGGUUGA | | CUCUCAA | | GGGUUGA | |
| NM_ | 2708- | csgsuuc(Uhd)UfuCfUfC | 4265 | VPusUfsuugGfcUfGfag | 4599 | CTCGTTCTT | 4933 | CGUUCUU | 5267 | CUUUGGCU | 5601 | CGUUCUU | 5935 | UUUUGGCU | 6269 |
| 009125.2 | 2730 | fucagccaaaaL96 | | agAfaAfgaacgsasg | | TCTCTCAG | | UCUCUCA | | GAGAGAAA | | UCUCUCA | | GAGAGAAA | |
| | | | | | | CCAAAG | | GCCAAAG | | GAACGAG | | GCCAAAA | | GAACGAG | |
| NM_ | 2709- | gsusucu(Uhd)UfcUfCfU | 4266 | VPusCfsuuuGfgCfUfga | 4600 | TCGTTCTTT | 4934 | GUUCUUU | 5268 | GCUUUGGC | 5602 | GUUCUUU | 5936 | UCUUUGGC | 6270 |
| 009125.2 | 2731 | fcagccaaagaL96 | | gaGfaAfagaacsgsa | | CTCTCAGC | | CUCUCAG | | UGAGAGAA | | CUCUCAG | | UGAGAGAA | |
| | | | | | | CAAAGC | | CCAAAGC | | AGAACGA | | CCAAAGA | | AGAACGA | |
| NM_ | 3143- | asgsucc(Uhd)GfuCfAfU | 4267 | VPusUfsuacCfuUfGfua | 4601 | ACAGTCCT | 4935 | AGUCCUG | 5269 | AUUACCUU | 5603 | AGUCCUG | 5937 | UUUACCUU | 6271 |
| 009125.2 | 3165 | facaagguaaaL96 | | ugAfcAfggacusgsu | | GTCATACA | | UCAUACA | | GUAUGACA | | UCAUACA | | GUAUGACA | |
| | | | | | | AGGTAAT | | AGGUAAU | | GGACUGU | | AGGUAAA | | GGACUGU | |
| NM_ | 3144- | gsusccu(Ghd)UfcAfUfA | 4268 | VPusAfsuuaCfcUfUfgu | 4602 | CAGTCCTG | 4936 | GUCCUGU | 5270 | CAUUACCU | 5604 | GUCCUGU | 5938 | UAUUACCU | 6272 |
| 009125.2 | 3166 | fcaagguaauaL96 | | auGfaCfaggacsusg | | TCATACAA | | CAUACAA | | UGUAUGAC | | CAUACAA | | UGUAUGAC | |
| | | | | | | GGTAATG | | GGUAAUG | | AGGACUG | | GGUAAUA | | AGGACUG | |
| NM_ | 3148- | usgsuca(Uhd)AfcAfAfG | 4269 | VPusUfsggcAfuUfAfcc | 4603 | CCTGTCAT | 4937 | UGUCAUA | 5271 | CUGGCAUU | 5605 | UGUCAUA | 5939 | UUGGCAUU | 6273 |
| 009125.2 | 3170 | fguaaugccaaL96 | | uuGfuAfugacasgsg | | ACAAGGTA | | CAAGGUA | | ACCUUGUA | | CAAGGUA | | ACCUUGUA | |
| | | | | | | ATGCCAG | | AUGCCAG | | UGACAGG | | AUGCCAA | | UGACAGG | |
| NM_ | 3149- | gsuscau(Ahd)CfaAfGfG | 4270 | VPusCfsuggCfaUfUfac | 4604 | CTGTCATA | 4938 | GUCAUAC | 5272 | CCUGGCAU | 5606 | GUCAUAC | 5940 | UCUGGCAU | 6274 |
| 009125.2 | 3171 | fuaaugccagaL96 | | cuUfgUfaugacsasg | | CAAGGTAA | | AAGGUAA | | UACCUUGU | | AAGGUAA | | UACCUUGU | |
| | | | | | | TGCCAGG | | UGCCAGG | | AUGACAG | | UGCCAGA | | AUGACAG | |
| NM_ | 3303- | uscsuac(Uhd)UfuGfCfC | 4271 | VPusGfsgugGfaAfAfu | 4605 | TTTCTACTT | 4939 | UCUACUU | 5273 | CGGUGGAA | 5607 | UCUACUU | 5941 | UGGUGGAA | 6275 |
| 009125.2 | 3325 | fauuuccaccaL96 | | ggcAfaAfguagasasa | | TGCCATTT | | UGCCAUU | | AUGGCAAA | | UGCCAUU | | AUGGCAAA | |
| | | | | | | CCACCG | | UCCACCG | | GUAGAAA | | UCCACCA | | GUAGAAA | |
| NM_ | 3950- | asasgca(Chd)AfgAfAfA | 4272 | VPusAfsguuCfuAfGfu | 4606 | GGAAGCAC | 4940 | AAGCACA | 5274 | AAGUUCUA | 5608 | AAGCACA | 5942 | UAGUUCUA | 6276 |
| 009125.2 | 3972 | facuagaacuaL96 | | uuuCfuGfugcuuscsc | | AGAAAACT | | GAAAACU | | GUUUUCUG | | GAAAACU | | GUUUUCUG | |
| | | | | | | AGAACTT | | AGAACUU | | UGCUUCC | | AGAACUA | | UGCUUCC | |
| NM_ | 3952- | gscsaca(Ghd)AfaAfAfC | 4273 | VPusGfsaagUfuCfUfag | 4607 | AAGCACAG | 4941 | GCACAGA | 5275 | UGAAGUUC | 5609 | GCACAGA | 5943 | UGAAGUUC | 6277 |
| 009125.2 | 3974 | fuagaacuucaL96 | | uuUfuCfugugcsusu | | AAAACTAG | | AAACUAG | | UAGUUUUC | | AAACUAG | | UAGUUUUC | |
| | | | | | | AACTTCA | | AACUUCA | | UGUGCUU | | AACUUCA | | UGUGCUU | |
| NM_ | 3954- | ascsaga(Ahd)AfaCfUfA | 4274 | VPusAfsugaAfgUfUfcu | 4608 | GCACAGAA | 4942 | ACAGAAA | 5276 | AAUGAAGU | 5610 | ACAGAAA | 5944 | UAUGAAGU | 6278 |
| 009125.2 | 3976 | fgaacuucauaL96 | | agUfuUfucugusgsc | | AACTAGAA | | ACUAGAA | | UCUAGUUU | | ACUAGAA | | UCUAGUUU | |
| | | | | | | CTTCATT | | CUUCAUU | | UCUGUGC | | CUUCAUA | | UCUGUGC | |
| NM_ | 3955- | csasgaa(Ahd)AfcUfAfG | 4275 | VPusAfsaugAfaGfUfuc | 4609 | CACAGAAA | 4943 | CAGAAAA | 5277 | CAAUGAAG | 5611 | CAGAAAA | 5945 | UAAUGAAG | 6279 |
| 009125.2 | 3977 | faacuucauuaL96 | | uaGfuUfuucugsusg | | ACTAGAAC | | CUAGAAC | | UUCUAGUU | | CUAGAAC | | UUCUAGUU | |
| | | | | | | TTCATTG | | UUCAUUG | | UUCUGUG | | UUCAUUA | | UUCUGUG | |
| NM_ | 4134- | usgscuu(Ghd)CfuGfAfA | 4276 | VPusAfscuuCfcAfGfuu | 4610 | TCTGCTTG | 4944 | UGCUUGC | 5278 | AACUUCCA | 5612 | UGCUUGC | 5946 | UACUUCCA | 6280 |
| 009125.2 | 4156 | facuggaaguaL96 | | ucAfgCfaagcasgsa | | CTGAAACT | | UGAAACU | | GUUUCAGC | | UGAAACU | | GUUUCAGC | |
| | | | | | | GGAAGTT | | GGAAGUU | | AAGCAGA | | GGAAGUA | | AAGCAGA | |
| NM_ | 4140- | csusgaa(Ahd)CfuGfGfA | 4277 | VPusUfsaaaUfaAfCfuu | 4611 | TGCTGAAA | 4945 | CUGAAAC | 5279 | AUAAAUAA | 5613 | CUGAAAC | 5947 | UUAAAUAA | 6281 |
| 009125.2 | 4162 | faguuauuuaaL96 | | ccAfgUfuucagscsa | | CTGGAAGT | | UGGAAGU | | CUUCCAGU | | UGGAAGU | | CUUCCAGU | |
| | | | | | | TATTTAT | | UAUUUAU | | UUCAGCA | | UAUUUAA | | UUCAGCA | |
| NM_ | 4141- | usgsaaa(Chd)UfgGfAfA | 4278 | VPusAfsuaaAfuAfAfcu | 4612 | GCTGAAAC | 4946 | UGAAACU | 5280 | AAUAAAUA | 5614 | UGAAACU | 5948 | UAUAAAUA | 6282 |
| 009125.2 | 4163 | fguuauuuauaL96 | | ucCfaGfuuucasgsc | | TGGAAGTT | | GGAAGUU | | ACUUCCAG | | GGAAGUU | | ACUUCCAG | |
| | | | | | | ATTTATT | | AUUUAUU | | UUUCAGC | | AUUUAUA | | UUUCAGC | |
| NM_ | 4142- | gsasaac(Uhd)GfgAfAfG | 4279 | VPusAfsauaAfaUfAfac | 4613 | CTGAAACT | 4947 | GAAACUG | 5281 | AAAUAAAU | 5615 | GAAACUG | 5949 | UAAUAAAU | 6283 |
| 009125.2 | 4164 | fuuauuuauuaL96 | | uuCfcAfguuucsasg | | GGAAGTTA | | GAAGUUA | | AACUUCCA | | GAAGUUA | | AACUUCCA | |
| | | | | | | TTTATTT | | UUUAUUU | | GUUUCAG | | UUUAUUA | | GUUUCAG | |
| NM_ | 4142- | gsasaac(Uhd)GfgAfAfG | 4280 | VPusAfsauaAfaUfAfac | 4614 | CCGAAACT | 4948 | GAAACUG | 5282 | AAAUAAAU | 5616 | GAAACUG | 5950 | UAAUAAAU | 6284 |
| 009125.2 | 4164 | fuuauuuauuaL96 | | uuCfcAfguuucsasg | | GGAAGTTA | | GAAGUUA | | AACUUCCA | | GAAGUUA | | AACUUCCA | |
| | | | | | | TTTATTT | | UUUAUUU | | GUUUCAG | | UUUAUUA | | GUUUCAG | |
| NM_ | 4174- | ususgag(Ahd)GfuCfAfU | 4281 | VPusGfsaugUfgUfUfca | 4615 | CCTTGAGA | 4949 | UUGAGAG | 5283 | UGAUGUGU | 5617 | UUGAGAG | 5951 | UGAUGUGU | 6285 |
| 009125.2 | 4196 | fgaacacaucaL96 | | ugAfcUfcucaasgsg | | GTCATGAA | | UCAUGAA | | UCAUGACU | | UCAUGAA | | UCAUGACU | |
| | | | | | | CACATCA | | CACAUCA | | CUCAAGG | | CACAUCA | | CUCAAGG | |
| NM_ | 4179- | asgsuca(Uhd)GfaAfCfA | 4282 | VPusUfsagcUfgAfUfgu | 4616 | AGAGTCAT | 4950 | AGUCAUG | 5284 | CUAGCUGA | 5618 | AGUCAUG | 5952 | UUAGCUGA | 6286 |
| 009125.2 | 4201 | fcaucagcuaaL96 | | guUfcAfugacuscsu | | GAACACAT | | AACACAU | | UGUGUUCA | | AACACAU | | UGUGUUCA | |
| | | | | | | CAGCTAG | | CAGCUAG | | UGACUCU | | CAGCUAA | | UGACUCU | |
| NM_ | 4179- | asgsuca(Uhd)GfaAfCfA | 4283 | VPusUfsagcUfgAfUfgu | 4617 | AAAGTCAT | 4951 | AGUCAUG | 5285 | AUAGCUGA | 5619 | AGUCAUG | 5953 | UUAGCUGA | 6287 |
| 009125.2 | 4201 | fcaucaguaaL96 | | guUfcAfugacuscsu | | GAACACAT | | AACACAU | | UGUGUUCA | | AACACAU | | UGUGUUCA | |
| | | | | | | CAGCTAG | | CAGCUAU | | UGACUCU | | CAGCUAA | | UGACUCU | |
| NM_ | 4180- | gsuscau(Ghd)AfaCfAfC | 4284 | VPusCfsuagCfuGfAfug | 4618 | GAGTCATG | 4952 | GUCAUGA | 5286 | GCUAGCUG | 5620 | GUCAUGA | 5954 | UCUAGCUG | 6288 |
| 009125.2 | 4202 | faucagcuagaL96 | | ugUfuCfaugacsusc | | AACACATC | | ACACAUC | | AUGUGUUC | | ACACAUC | | AUGUGUUC | |
| | | | | | | AGCTAGC | | AGCUAGC | | AUGACUC | | AGCUAGA | | AUGACUC | |
| NM_ | 4180- | gsuscau(Ghd)AfaCfAfC | 4285 | VPusCfsuagCfuGfAfug | 4619 | AAGTCATG | 4953 | GUCAUGA | 5287 | ACUAGCTG | 5621 | GUCAUGA | 5955 | UCUAGCUG | 6289 |
| 009125.2 | 4202 | faucagcuagaL96 | | ugUfuCfaugacsusc | | AACACATC | | ACACAUC | | AUGUGUUC | | ACACAUC | | AUGUGUUC | |
| | | | | | | AGCTAGC | | AGCUAGU | | AUGACUC | | AGCUAGA | | AUGACUC | |
| NM_ | 4183- | asusgaa(Chd)AfcAfUfC | 4286 | VPusUfsugcUfaGfCfug | 4620 | TCATGAAC | 4954 | AUGAACA | 5288 | GUUGCUAG | 5622 | AUGAACA | 5956 | UUUGCUAG | 6290 |
| 009125.2 | 4205 | fagcuagcaaaL96 | | auGfuGfuucausgsa | | ACATCAGC | | CAUCAGC | | CUGAUGUG | | CAUCAGC | | CUGAUGUG | |
| | | | | | | TAGCAAC | | UAGCAAC | | UUCAUGA | | UAGCAAA | | UUCAUGA | |
| NM_ | 4184- | usgsaac(Ahd)CfaUfCfA | 4287 | VPusGfsuugCfuAfGfcu | 4621 | CATGAACA | 4955 | UGAACAC | 5289 | UGUUGCUA | 5623 | UGAACAC | 5957 | UGUUGCUA | 6291 |
| 009125.2 | 4206 | fgcuagcaacaL96 | | gaUfgUfguucasusg | | CATCAGCT | | AUCAGCU | | GCUGAUGU | | AUCAGCU | | GCUGAUGU | |
| | | | | | | AGCAACA | | AGCAACA | | GUUCAUG | | AGCAACA | | GUUCAUG | |
| NM_ | 4191- | asuscag(Chd)UfaGfCfA | 4288 | VPusUfsacuUfcUfGfuu | 4622 | ACATCAGC | 4956 | AUCAGCU | 5290 | UUACUUCU | 5624 | AUCAGCU | 5958 | UUACUUCU | 6292 |
| 009125.2 | 4213 | facagaaguaaL96 | | gcUfaGfcugausgsu | | TAGCAACA | | AGCAACA | | GUUGCUAG | | AGCAACA | | GUUGCUAG | |
| | | | | | | GAAGTAA | | GAAGUAA | | CUGAUGU | | GAAGUAA | | CUGAUGU | |
| NM_ | 4193- | csasgcu(Ahd)GfcAfAfC | 4289 | VPusGfsuuaCfuUfCfug | 4623 | ATCAGCTA | 4957 | CAGCUAG | 5291 | UGUUACUU | 5625 | CAGCUAG | 5959 | UGUUACUU | 6293 |
| 009125.2 | 4215 | fagaaguaacaL96 | | uuGfcUfagcugsasu | | GCAACAGA | | CAACAGA | | CUGUUGCU | | CAACAGA | | CUGUUGCU | |
| | | | | | | AGTAACA | | AGUAACA | | AGCUGAU | | AGUAACA | | AGCUGAU | |
| NM_ | 4196- | csusagc(Ahd)AfcAfGfA | 4290 | VPusCfsuugUfuAfCfuu | 4624 | AGCTAGCA | 4958 | CUAGCAA | 5292 | UCUUGUUA | 5626 | CUAGCAA | 5960 | UCUUGUUA | 6294 |
| 009125.2 | 4218 | faguaacaagaL96 | | cuGfuUfgcuagscsu | | ACAGAAGT | | CAGAAGU | | CUUCUGUU | | CAGAAGU | | CUUCUGUU | |
| | | | | | | AACAAGA | | AACAAGA | | GCUAGCU | | AACAAGA | | GCUAGCU | |
| NM_ | 4197- | usasgca(Ahd)CfaGfAfA | 4291 | VPusUfscuuGfuUfAfcu | 4625 | GCTAGCAA | 4959 | UAGCAAC | 5293 | CUCUUGUU | 5627 | UAGCAAC | 5961 | UUCUUGUU | 6295 |
| 009125.2 | 4219 | fguaacaagaaL96 | | ucUfgUfugcuasgsc | | CAGAAGTA | | AGAAGUA | | ACUUCUGU | | AGAAGUA | | ACUUCUGU | |
| | | | | | | ACAAGAG | | ACAAGAG | | UGCUAGC | | ACAAGAA | | UGCUAGC | |
| NM_ | 4204- | asgsaag(Uhd)AfaCfAfA | 4292 | VPusGfsaauCfaCfUfcu | 4626 | ACAGAAGT | 4960 | AGAAGUA | 5294 | AGAAUCAC | 5628 | AGAAGUA | 5962 | UGAAUCAC | 6296 |
| 009125.2 | 4226 | fgagugauucaL96 | | ugUfuAfcuucusgsu | | AACAAGAG | | ACAAGAG | | UCUUGUUA | | ACAAGAG | | UCUUGUUA | |
| | | | | | | TGATTCT | | UGAUUCU | | CUUCUGU | | UGAUUCA | | CUUCUGU | |
| NM_ | 4204- | asgsaag(Uhd)AfaCfAfA | 4293 | VPusGfsaauCfaCfUfcu | 4627 | AAAGAAGT | 4961 | AGAAGUA | 5295 | AGAAUCAC | 5629 | AGAAGUA | 5963 | UGAAUCAC | 6297 |
| 009125.2 | 4226 | fgagugauucaL96 | | ugUfuAfcuucusgsu | | AACAAGAG | | ACAAGAG | | UCUUGUUA | | ACAAGAG | | UCUUGUUA | |
| | | | | | | TGATTCT | | UGAUUCU | | CUUCUGU | | UGAUUCA | | CUUCUGU | |
| NM_ | 4223- | csusugc(Uhd)GfcUfAfU | 4294 | VPusAfsaagCfgGfUfaa | 4628 | TTCTTGCTG | 4962 | CUUGCUG | 5296 | UAAAGCGG | 5630 | CUUGCUG | 5964 | UAAAGCGG | 6298 |
| 009125.2 | 4245 | fuaccgcuuuaL96 | | uaGfcAfgcaagsasa | | CTATTACC | | CUAUUAC | | UAAUAGCA | | CUAUUAC | | UAAUAGCA | |
| | | | | | | GCTTTA | | CGCUUUA | | GCAAGAA | | CGCUUUA | | GCAAGAA | |
| NM_ | 4226- | gscsugc(Uhd)AfuUfAfC | 4295 | VPusUfsuuaAfaGfCfgg | 4629 | TTGCTGCT | 4963 | GCUGCUA | 5297 | UUUUAAAG | 5631 | GCUGCUA | 5965 | UUUUAAAG | 6299 |
| 009125.2 | 4248 | fcgcuuuaaaaL96 | | uaAfuAfgcagcsasa | | ATTACCGC | | UUACCGC | | CGGUAAUA | | UUACCGC | | CGGUAAUA | |
| | | | | | | TTTAAAA | | UUUAAAA | | GCAGCAA | | UUUAAAA | | GCAGCAA | |
| NM_ | 4270- | cscscuu(Uhd)UfaCfUfA | 4296 | VPusUfsgucAfaGfUfuu | 4630 | CGCCCTTTT | 4964 | CCCUUUU | 5298 | CUGUCAAG | 5632 | CCCUUUU | 5966 | UUGUCAAG | 6300 |
| 009125.2 | 4292 | faacuugacaaL96 | | agUfaAfaagggscsg | | ACTAAACT | | ACUAAAC | | UUUAGUAA | | ACUAAAC | | UUUAGUAA | |
| | | | | | | TGACAG | | UUGACAG | | AAGGGCG | | UUGACAA | | AAGGGCG | |
| NM_ | 4272- | csusuuu(Ahd)CfuAfAfA | 4297 | VPusUfscugUfcAfAfgu | 4631 | CCCTTTTAC | 4965 | CUUUUAC | 5299 | UUCUGUCA | 5633 | CUUUUAC | 5967 | UUCUGUCA | 6301 |
| 009125.2 | 4294 | fcuugacagaaL96 | | uuAfgUfaaaagsgsg | | TAAACTTG | | UAAACUU | | AGUUUAGU | | UAAACUU | | AGUUUAGU | |
| | | | | | | ACAGAA | | GACAGAA | | AAAAGGG | | GACAGAA | | AAAAGGG | |
| NM_ | 4273- | ususuua(Chd)UfaAfAfC | 4298 | VPusUfsucuGfuCfAfag | 4632 | CCTTTTACT | 4966 | UUUUACU | 5300 | CUUCUGUC | 5634 | UUUUACU | 5968 | UUUCUGUC | 6302 |
| 009125.2 | 4295 | fuugacagaaaL96 | | uuUfaGfuaaaasgsg | | AAACTTGA | | AAACUUG | | AAGUUUAG | | AAACUUG | | AAGUUUAG | |
| | | | | | | CAGAAG | | ACAGAAG | | UAAAAGG | | ACAGAAA | | UAAAAGG | |
| NM_ | 4276- | usascua(Ahd)AfcUfUfG | 4299 | VPusAfsacuUfcUfGfuc | 4633 | TTTACTAA | 4967 | UACUAAA | 5301 | GAACUUCU | 5635 | UACUAAA | 5969 | UAACUUCU | 6303 |
| 009125.2 | 4298 | facagaaguuaL96 | | aaGfuUfuaguasasa | | ACTTGACA | | CUUGACA | | GUCAAGUU | | CUUGACA | | GUCAAGUU | |
| | | | | | | GAAGTTC | | GAAGUUC | | UAGUAAA | | GAAGUUA | | UAGUAAA | |
| NM_ | 4278- | csusaaa(Chd)UfuGfAfC | 4300 | VPusUfsgaaCfuUfCfug | 4634 | TACTAAAC | 4968 | CUAAACU | 5302 | CUGAACUU | 5636 | CUAAACU | 5970 | UUGAACUU | 6304 |
| 009125.2 | 4300 | fagaaguucaaL96 | | ucAfaGfuuuagsusa | | TTGACAGA | | UGACAGA | | CUGUCAAG | | UGACAGA | | CUGUCAAG | |
| | | | | | | AGTTCAG | | AGUUCAG | | UUUAGUA | | AGUUCAA | | UUUAGUA | |
| NM_ | 4282- | ascsuug(Ahd)CfaGfAfA | 4301 | VPusUfsuacUfgAfAfcu | 4635 | AAACTTGA | 4969 | ACUUGAC | 5303 | UUUACUGA | 5637 | ACUUGAC | 5971 | UUUACUGA | 6305 |
| 009125.2 | 4304 | fguucaguaaaL96 | | ucUfgUfcaagususu | | CAGAAGTT | | AGAAGUU | | ACUUCUGU | | AGAAGUU | | ACUUCUGU | |
| | | | | | | CAGTAAA | | CAGUAAA | | CAAGUUU | | CAGUAAA | | CAAGUUU | |
| NM_ | 4285- | usgsaca(Ghd)AfaGfUfU | 4302 | VPusAfsauuUfaCfUfga | 4636 | CTTGACAG | 4970 | UGACAGA | 5304 | GAAUUUAC | 5638 | UGACAGA | 5972 | UAAUUUAC | 6306 |
| 009125.2 | 4307 | fcaguaaauuaL96 | | acUfuCfugucasasg | | AAGTTCAG | | AGUUCAG | | UGAACUUC | | AGUUCAG | | UGAACUUC | |
| | | | | | | TAAATTC | | UAAAUUC | | UGUCAAG | | UAAAUUA | | UGUCAAG | |
| NM_ | 4287- | ascsaga(Ahd)GfuUfCfA | 4303 | VPusAfsgaaUfuUfAfcu | 4637 | TGACAGAA | 4971 | ACAGAAG | 5305 | AAGAAUUU | 5639 | ACAGAAG | 5973 | UAGAAUUU | 6307 |
| 009125.2 | 4309 | fguaaauucuaL96 | | gaAfcUfucuguscsa | | GTTCAGTA | | UUCAGUA | | ACUGAACU | | UUCAGUA | | ACUGAACU | |
| | | | | | | AATTCTT | | AAUUCUU | | UCUGUCA | | AAUUCUA | | UCUGUCA | |
| NM_ | 4288- | csasgaa(Ghd)UfuCfAfG | 4304 | VPusAfsagaAfuUfUfac | 4638 | GACAGAAG | 4972 | CAGAAGU | 5306 | UAAGAAUU | 5640 | CAGAAGU | 5974 | UAAGAAUU | 6308 |
| 009125.2 | 4310 | fuaaauucuuaL96 | | ugAfaCfuucugsusc | | TTCAGTAA | | UCAGUAA | | UACUGAAC | | UCAGUAA | | UACUGAAC | |
| | | | | | | ATTCTTA | | AUUCUUA | | UUCUGUC | | AUUCUUA | | UUCUGUC | |
| NM_ | 4289- | asgsaag(Uhd)UfcAfGfU | 4305 | VPusUfsaagAfaUfUfua | 4639 | ACAGAAGT | 4973 | AGAAGUU | 5307 | GUAAGAAU | 5641 | AGAAGUU | 5975 | UUAAGAAU | 6309 |
| 009125.2 | 4311 | faaauucuuaaL96 | | cuGfaAfcuucusgsu | | TCAGTAAA | | CAGUAAA | | UUACUGAA | | CAGUAAA | | UUACUGAA | |
| | | | | | | TTCTTAC | | UUCUUAC | | CUUCUGU | | UUCUUAA | | CUUCUGU | |
| NM_ | 4312- | cscsaaa(Chd)UfgAfCfG | 4306 | VPusAfsuaaUfaAfUfcc | 4640 | CGCCAAAC | 4974 | CCAAACU | 5308 | AAUAAUAA | 5642 | CCAAACU | 5976 | UAUAAUAA | 6310 |
| 009125.2 | 4334 | fgauuauuauaL96 | | guCfaGfuuuggscsg | | TGACGGAT | | GACGGAU | | UCCGUCAG | | GACGGAU | | UCCGUCAG | |
| | | | | | | TATTATT | | UAUUAUU | | UUUGGCG | | UAUUAUA | | UUUGGCG | |
| NM_ | 4385- | gsusuaa(Ghd)GfgAfAfA | 4307 | VPusAfsguaAfaAfGfuu | 4641 | AAGTTAAG | 4975 | GUUAAGG | 5309 | AAGUAAAA | 5643 | GUUAAGG | 5977 | UAGUAAAA | 6311 |
| 009125.2 | 4407 | facuuuuacuaL96 | | uuCfcCfuuaacsusu | | GGAAAACT | | GAAAACU | | GUUUUCCC | | GAAAACU | | GUUUUCCC | |
| | | | | | | TTTACTT | | UUUACUU | | UUAACUU | | UUUACUA | | UUAACUU | |
| NM_ | 4386- | ususaag(Ghd)GfaAfAfA | 4308 | VPusAfsaguAfaAfAfgu | 4642 | AGTTAAGG | 4976 | UUAAGGG | 5310 | AAAGUAAA | 5644 | UUAAGGG | 5978 | UAAGUAAA | 6312 |
| 009125.2 | 4408 | fcuuuuacuuaL96 | | uuUfcCfcuuaascsu | | GAAAACTT | | AAAACUU | | AGUUUUCC | | AAAACUU | | AGUUUUCC | |
| | | | | | | TTACTTT | | UUACUUU | | CUUAACU | | UUACUUA | | CUUAACU | |
| NM_ | 4387- | usasagg(Ghd)AfaAfAfC | 4309 | VPusAfsaagUfaAfAfag | 4643 | GTTAAGGG | 4977 | UAAGGGA | 5311 | CAAAGUAA | 5645 | UAAGGGA | 5979 | UAAAGUAA | 6313 |
| 009125.2 | 4409 | fuuuuacuuuaL96 | | uuUfuCfccuuasasc | | AAAACTTT | | AAACUUU | | AAGUUUUC | | AAACUUU | | AAGUUUUC | |
| | | | | | | TACTTTG | | UACUUUG | | CCUUAAC | | UACUUUA | | CCUUAAC | |
| NM_ | 4389- | asgsgga(Ahd)AfaCfUfU | 4310 | VPusAfscaaAfgUfAfaa | 4644 | TAAGGGAA | 4978 | AGGGAAA | 5312 | UACAAAGU | 5646 | AGGGAAA | 5980 | UACAAAGU | 6314 |
| 009125.2 | 4411 | fuuacuuuguaL96 | | agUfuUfucccususa | | AACTTTTA | | ACUUUUA | | AAAAGUUU | | ACUUUUA | | AAAAGUUU | |
| | | | | | | CTTTGTA | | CUUUGUA | | UCCCUUA | | CUUUGUA | | UCCCUUA | |
| NM_ | 4390- | gsgsgaa(Ahd)AfcUfUfU | 4311 | VPusUfsacaAfaGfUfaa | 4645 | AAGGGAAA | 4979 | GGGAAAA | 5313 | CUACAAAG | 5647 | GGGAAAA | 5981 | UUACAAAG | 6315 |
| 009125.2 | 4412 | fuacuuuguaaL96 | | aaGfuUfuucccsusu | | ACTTTTACT | | CUUUUAC | | UAAAAGUU | | CUUUUAC | | UAAAAGUU | |
| | | | | | | TTGTAG | | UUUGUAG | | UUCCCUU | | UUUGUAA | | UUCCCUU | |
| NM_ | 4392- | gsasaaa(Chd)UfuUfUfA | 4312 | VPusUfscuaCfaAfAfgu | 4646 | GGGAAAAC | 4980 | GAAAACU | 5314 | AUCUACAA | 5648 | GAAAACU | 5982 | UUCUACAA | 6316 |
| 009125.2 | 4414 | fcuuuguagaaL96 | | aaAfaGfuuuucscsc | | TTTTACTTT | | UUUACUU | | AGUAAAAG | | UUUACUU | | AGUAAAAG | |
| | | | | | | GTAGAT | | UGUAGAU | | UUUUCCC | | UGUAGAA | | UUUUCCC | |
| NM_ | 4393- | asasaac(Uhd)UfuUfAfC | 4313 | VPusAfsucuAfcAfAfag | 4647 | GGAAAACT | 4981 | AAAACUU | 5315 | UAUCUACA | 5649 | AAAACUU | 5983 | UAUCUACA | 6317 |
| 009125.2 | 4415 | fuuuguagauaL96 | | uaAfaAfguuuuscsc | | TTTACTTTG | | UUACUUU | | AAGUAAAA | | UUACUUU | | AAGUAAAA | |
| | | | | | | TAGATA | | GUAGAUA | | GUUUUCC | | GUAGAUA | | GUUUUCC | |
| NM_ | 4393- | asasaac(Uhd)UfuUfAfC | 4314 | VPusAfsucuAfcAfAfag | 4648 | GAAAAACT | 4982 | AAAACUU | 5316 | UAUCUACA | 5650 | AAAACUU | 5984 | UAUCUACA | 6318 |
| 009125.2 | 4415 | fuuuguagauaL96 | | uaAfaAfguuuuscsc | | TTTACTTTG | | UUACUUU | | AAGUAAAA | | UUACUUU | | AAGUAAAA | |
| | | | | | | TAGATA | | GUAGAUA | | GUUUUCC | | GUAGAUA | | GUUUUCC | |

TABLE 11
Modified sense and antisense strand sequences of mouse and human ATXN2 siRNAs evaluated in AAV-transduced mice
expressing hATXN2-IRES-gLuc constructs

| Duplex | Oligo | | | | SEQ ID | | SEQ ID |
|---|---|---|---|---|---|---|---|
| Name | Name | Strand | Target | OligoSeq | NO: | TransSeq | NO: |
| AD-64228 | A-128009 | sense | None | asascaguGfuUfCfUfugcucuauaaL96 | 6319 | AACAGUGUUCUUGCUCUAUAA | 6320 |
| | A-128003 | antis | mTTR | usUfsauaGfaGfCfaagaAfcAgcuguususu | 6321 | UUAUAGAGCAAGAACACUGUUUU | 6322 |
| AD- | A-707687 | sense | ATXN2 | uscsagucUfaCfGfAfuuucuuuugaL96 | 1358 | UCAGUCUACGAUUUCUUUUGA | 1529 |
| 1037307 | A-1923523 | antis | ATXN2 | VPusCfsaaaAfgAfAfaucgUfaGfacugasgsg | 1415 | UCAAAAGAAAUCGUAGACUGAGG | 1586 |
| AD- | A-708019 | sense | ATXN2 | csasugagAfaAfAfGfuacagaaucuL96 | 18 | CAUGAGAAAAGUACAGAAUCU | 828 |
| 365144 | A-708020 | antis | ATXN2 | asGfsauuc(Tgn)guacuuUfuCfucaugsusg | 283 | AGAUUCTGUACUUUUCUCAUGUG | 6323 |
| AD- | A-709219 | sense | ATXN2 | asusccacUfuCfUfCfacacuucagaL96 | 1366 | AUCCACUUCUCACACUUCAGA | 1537 |
| 1039956 | A-1928560 | antis | ATXN2 | VPusCfsugaAfgUfGfugagAfaGfuggauscsu | 1423 | UCUGAAGUGUGAGAAGUGGAUCU | 1594 |
| AD- | A-713683 | sense | ATXN2 | asgsugguUfcAfAfCfuuuuaaguuaL96 | 1386 | AGUGGUUCAACUUUUAAGUUA | 1557 |
| 1044729 | A-1936873 | antis | ATXN2 | VPusAfsacuUfaAfAfaguuGfaAfccacusgsu | 1443 | UAACUUAAAAGUUGAACCACUGU | 1614 |
| AD- | A-713685 | sense | ATXN2 | gsusgguuCfaAfCfUfuuuaaguuaaL96 | 1387 | GUGGUUCAACUUUUAAGUUAA | 1558 |
| 1044730 | A-1936874 | antis | ATXN2 | VPusUfsaacUfuAfAfaaguUfgAfaccacsusg | 1444 | UUAACUUAAAAGUUGAACCACUG | 1615 |
| AD- | A-1923811 | sense | ATXN2 | csuscaguCfuAfCfGfauuucuuuuaL96 | 1359 | CUCAGUCUACGAUUUCUUUUA | 1530 |
| 1037453 | A-1923812 | antis | ATXN2 | VPusAfsaaaGfaAfAfucguAfgAfcugagsgsc | 1416 | UAAAAGAAAUCGUAGACUGAGGC | 1587 |
| AD- | A-1928751 | sense | ATXN2 | uscsucacAfcUfUfCfagauuucaaaL96 | 1367 | UCUCACACUUCAGAUUUCAAA | 1538 |
| 1040054 | A-1928752 | antis | ATXN2 | VPusUfsugaAfaUfCfugaaGfuGfugagasasg | 1424 | UUUGAAAUCUGAAGUGUGAGAAG | 1595 |
| AD- | A-1929687 | sense | ATXN2 | csuscuacUfaUfGfCfcuaaacgcaaL96 | 1368 | CUCUACUAUGCCUAAACGCAA | 1539 |
| 1040559 | A-1929688 | antis | ATXN2 | VPusUfsgcgUfuUfAfggcaUfaGfuagagsasc | 1425 | UUGCGUUUAGGCAUAGUAGAGAC | 1596 |
| AD- | A-1929689 | sense | ATXN2 | uscsuacuAfuGfCfCfuaaacgcauaL96 | 1369 | UCUACUAUGCCUAAACGCAUA | 1540 |
| 1040560 | A-1929690 | antis | ATXN2 | VPusAfsugcGfuUfUfaggcAfuAfguagasgsa | 1426 | UAUGCGUUUAGGCAUAGUAGAGA | 1597 |
| AD- | A-1929999 | sense | ATXN2 | uscsgaaaUfcAfCfAfgaguuucugaL96 | 1370 | UCGAAAUCACAGAGUUUCUGA | 1541 |
| 1040735 | A-1930000 | antis | ATXN2 | VPusCfsagaAfaCfUfcuguGfaUfuucgasgsg | 1427 | UCAGAAACUCUGUGAUUUCGAGG | 1598 |
| AD- | A-1930001 | sense | ATXN2 | csgsaaauCfaCfAfGfaguuucugcaL96 | 1371 | CGAAAUCACAGAGUUUCUGCA | 1542 |
| 1040736 | A-1930002 | antis | ATXN2 | VPusGfscagAfaAfCfucugUfgAfuuucgsasg | 1428 | UGCAGAAACUCUGUGAUUUCGAG | 1599 |
| AD- | A-1931750 | sense | ATXN2 | gsusucuaCfuUfCfUfgaaucuaugaL96 | 1374 | GUUCUACUUCUGAAUCUAUGA | 1545 |
| 1041737 | A-1931751 | antis | ATXN2 | VPusCfsauaGfaUfUfcagaAfgUfagaacsusu | 1431 | UCAUAGAUUCAGAAGUAGAACUU | 1602 |
| AD- | A-1931754 | sense | ATXN2 | csusacuuCfuGfAfAfucuauggauaL96 | 1376 | CUACUUCUGAAUCUAUGGAUA | 1547 |
| 1041739 | A-1931755 | antis | ATXN2 | VPusAfsuccAfuAfGfauucAfgAfaguagsasa | 1433 | UAUCCAUAGAUUCAGAAGUAGAA | 1604 |
| AD- | A-1931976 | sense | ATXN2 | ascscaagUfgCfUfAfaggauucuuaL96 | 1377 | ACCAAGUGCUAAGGAUUCUUA | 1548 |
| 1041872 | A-1931977 | antis | ATXN2 | VPusAfsagaAfuCfCfuuagCfaCfuuggususc | 1434 | UAAGAAUCCUUAGCACUUGGUUC | 1605 |
| AD- | A-1985507 | sense | ATXN2 | asgsagu(Ghd)AfuUfCfUfugcugcuauaL96 | 1396 | AGAGUGAUUCUUGCUGCUAUA | 1567 |
| 1069814 | A-1936499 | antis | ATXN2 | VPusAfsuagCfaGfCfaagaAfuCfacucususg | 1453 | UAUAGCAGCAAGAAUCACUCUUG | 1624 |

TABLE 12
Tabulated gLuc and ATXN2 knockdown results in siRNA-
treated mice expressing hATXN2-IRES-gLuc constructs

| | | Normalized to D0 | | | |
|---|---|---|---|---|---|
| Group | | gLuc (D14) | | qPCR (D14) | |
| # | Treatment | Average | SD | Average | SD |
| 1 | PBS | 100.00 | 21.97 | 100.00 | 11.57 |
| 2 | Naïve | 134.50 | 28.23 | 182.79 | 66.47 |
| 3 | AD-1040560.1 | 54.78 | 5.94 | 62.35 | 19.17 |
| 4 | AD-10447292.1 | 39.63 | 10.64 | 77.30 | 11.50 |
| 5 | AD-1040736.1 | 74.91 | 26.73 | 98.10 | 23.68 |
| 6 | AD-1041737.1 | 63.81 | 25.48 | 75.55 | 23.67 |
| 7 | AD-1041739.1 | 75.63 | 14.58 | 119.47 | 29.33 |
| 8 | AD-1040559.1 | 70.49 | 7.78 | 114.90 | 32.60 |
| 9 | AD-1040735.1 | 80.54 | 8.77 | 112.80 | 12.88 |
| 10 | AD-1041872.1 | 82.15 | 26.80 | 150.26 | 54.27 |
| 11 | AD-1037453.1 | 121.06 | 10.70 | 163.16 | 6.26 |
| 12 | AD-1039956.1 | 79.72 | 10.11 | 143.95 | 23.25 |
| 13 | AD-1037307.1 | 123.34 | 31.27 | 170.67 | 44.76 |
| 14 | AD-1044730.1 | 43.34 | 8.75 | 110.76 | 35.51 |
| 15 | AD-1069814.1 | 74.97 | 10.99 | 143.77 | 35.16 |
| 16 | AD-1040054.1 | 76.36 | 21.92 | 126.14 | 32.29 |
| 17 | AD-365144.1 | 46.49 | 7.51 | 146.22 | 21.18 |
| 18 | AD-64228.41 (CTL) | 67.34 | 13.15 | 164.72 | 55.67 |

TABLE 13
Tabulated dosage and gLuc knockdown results for siRNA-
treated mice expressing hATXN2-IRES-gLuc constructs

| | | | | | | Treatment - Day | | |
|---|---|---|---|---|---|---|---|---|
| Duplex | Dose | Unit | Frequency | Injection | Tissue | Avg | SD | day |
| AD-1040560.1 | 5 | mpk | Once | SC | Liver | 54.7808 | 5.935449 | 14 |
| AD-1044729.1 | 5 | mpk | Once | SC | Liver | 39.6288 | 10.63508 | 14 |
| AD-1040736.1 | 5 | mpk | Once | SC | Liver | 74.9069 | 26.73369 | 14 |
| AD-1041737.1 | 5 | mpk | Once | SC | Liver | 63.8063 | 25.48052 | 14 |
| AD-1041739.1 | 5 | mpk | Once | SC | Liver | 75.6285 | 14.57687 | 14 |
| AD-1040559.1 | 5 | mpk | Once | SC | Liver | 70.4864 | 7.776618 | 14 |
| AD-1040735.1 | 5 | mpk | Once | SC | Liver | 80.5356 | 8.769235 | 14 |
| AD-1041872.1 | 5 | mpk | Once | SC | Liver | 82.1471 | 26.79664 | 14 |
| AD-1037453.1 | 5 | mpk | Once | SC | Liver | 121.057 | 10.70181 | 14 |
| AD-1039956.1 | 5 | mpk | Once | SC | Liver | 79.7205 | 10.11007 | 14 |
| AD-1037307.1 | 5 | mpk | Once | SC | Liver | 123.336 | 31.26885 | 14 |
| AD-1044730.1 | 5 | mpk | Once | SC | Liver | 43.3394 | 8.75033 | 14 |
| AD-1069814.1 | 5 | mpk | Once | SC | Liver | 74.9677 | 10.98704 | 14 |

INFORMAL SEQUENCE LISTING

SEQ ID NO: 1

| | |
|---|---|
| LOCUS | NM_002973 4712 bp mRNA linear PRI 21-FEB-2019 |
| DEFINITION | Homo sapiens ataxin 2 (ATXN2), transcript variant 1, mRNA. |
| VERSION | NM_002973.3 |

| | |
|---|---|
| 1 | acccccgaga aagcaaccca gcgcgccgcc cgctcctcac gtgtccctcc cggccccggg |
| 61 | gccacctcac gttctgcttc cgtctgaccc ctccgacttc cggtaaagag tccctatccg |
| 121 | cacctccgct cccacccggc gcctcggcgc gcccgccctc cgatgcgctc agcggccgca |
| 181 | gctcctcgga gtcccgcggt ggccaccgag tctcgccgct tcgccgcagc caggtggccc |
| 241 | gggtggcgct cgctccagcg gccggcgcgg cggagcgggc ggggcggcgg tggcgcggcc |
| 301 | ccgggaccgt atccctccgc cgcccctccc ccgcccggcc ccggcccccc tccctcccgg |
| 361 | cagagctcgc ctccctccgc ctcagactgt tttggtagca acggcaacgg cggcggcgcg |
| 421 | tttcggcccg gctcccggcg gctccttggt ctcggcgggc ctccccgccc cttcgtcgtc |
| 481 | ctccttctcc ccctcgccag cccgggcgcc cctccggccg cgccaacccg cgcctccccg |
| 541 | ctcggcgccc gcgcgtcccc gccgcgttcc ggcgtctcct tggcgcgccc ggctcccggc |
| 601 | tgtccccgcc cggcgtgcga gccggtgtat gggcccctca ccatgtcgct gaagccccag |
| 661 | cagcagcagc agcagcagca gcagcagcag cagcagcaac agcagcagca gcagcagcag |
| 721 | cagcagccgc cgcccgcggc tgccaatgtc cgcaagcccg gcggcagcgg ccttctagcg |
| 781 | tcgcccgccg ccgcgccttc gccgtcctcg tcctcggtct cctcgtcctc ggccacggct |
| 841 | ccctcctcgg tggtcgcggc gacctccggc ggcgggaggc ccggcctggg cagaggtcga |
| 901 | aacagtaaca aaggactgcc tcagtctacg atttcttttg atggaatcta tgcaaatatg |
| 961 | aggatggttc atatacttac atcagttgtt ggctccaaat gtgaagtaca agtgaaaaat |
| 1021 | ggaggtatat atgaaggagt ttttaaaact tacagtccga agtgtgattt ggtacttgat |
| 1081 | gccgcacatg agaaaagtac agaatccagt tcggggccga aacgtgaaga aataatggag |
| 1141 | agtattttgt tcaaatgttc agactttgtt gtggtacagt ttaaagatat ggactccagt |
| 1201 | tatgcaaaaa gagatgcttt tactgactct gctatcagtg ctaaagtgaa tggcgaacac |
| 1261 | aaagagaagg acctggagcc ctgggatgca ggtgaactca cagccaatga ggaacttgag |
| 1321 | gctttggaaa atgacgtatc taatggatgg gatcccaatg atatgtttcg atataatgaa |
| 1381 | gaaaattatg gtgtagtgtc tacgtatgat agcagtttat cttcgtatac agtgccctta |
| 1441 | gaaagagata actcagaaga atttttaaaa cgggaagcaa gggcaaacca gttagcagaa |
| 1501 | gaaattgagt caagtgccca gtacaaagct cgagtggccc tggaaaatga tgataggagt |
| 1561 | gaggaagaaa aatacacagc agttcagaga aattccagtg aacgtgaggg gcacagcata |
| 1621 | aacactaggg aaaataaata tattcctcct ggacaaagaa atagagaagt catatcctgg |
| 1681 | ggaagtggga gacagaattc accgcgtatg ggccagcctg gatcgggctc catgccatca |
| 1741 | agatccactt ctcacacttc agatttcaac ccgaattctg gttcagacca aagagtagtt |
| 1801 | aatggaggtg ttccctggcc atcgccttgc ccatctcctt cctctcgccc accttctcgc |
| 1861 | taccagtcag gtcccaactc tcttccacct cgggcagcca cccctacacg gccgccctcc |
| 1921 | aggcccccct cgcggccatc cagacccccg tctcacccct ctgctcatgg ttctccagct |
| 1981 | cctgtctcta ctatgcctaa acgcatgtct tcagaagggc ctccaaggat gtccccaaag |
| 2041 | gcccagcgac atcctcgaaa tcacagagtt tctgctggga ggggttccat atccagtggc |
| 2101 | ctagaatttg tatcccacaa cccacccagt gaagcagcta ctcctccagt agcaaggacc |
| 2161 | agtccctcgg ggggaacgtg gtcatcagtg gtcagtgggg ttccaagatt atcccctaaa |
| 2221 | actcatagac ccaggtctcc cagacagaac agtattggaa atacccccag tgggccagtt |
| 2281 | cttgcttctc cccaagctgg tattattcca actgaagctg ttgccatgcc tattccagct |
| 2341 | gcatctccta cgcctgctag tcctgcatcg aacagagctg ttaccccttc tagtgaggct |
| 2401 | aaagattcca ggcttcaaga tcagaggcag aactctcctg cagggaataa agaaaatatt |
| 2461 | aaacccaatg aaacatcacc tagcttctca aaagctgaaa acaaaggtat atcaccagtt |
| 2521 | gtttctgaac atagaaaaca gattgatgat ttaaagaaat ttaagaatga ttttaggtta |
| 2581 | cagccaagtt ctacttctga atctatggat caactactaa acaaaaatag agagggagaa |
| 2641 | aaatcaagag atttgatcaa agacaaaatt gaaccaagtg ctaaggattc tttcattgaa |
| 2701 | aatagcagca gcaactgtac cagtggcagc agcaagccga atagccccag catttcccct |
| 2761 | tcaatactta gtaacacgga gcacaagagg ggacctgagg tcacttccca aggggttcag |
| 2821 | acttccagcc cagcatgtaa acaagagaaa gacgataagg aagagaagaa agacgcagct |
| 2881 | gagcaagtta ggaaatcaac attgaatccc aatgcaaagg agttcaaccc acgttccttc |
| 2941 | tctcagccaa agccttctac taccccaact tcacctcggc ctcaagcaca acctagccca |
| 3001 | tctatggtgg gtcatcaaca gccaactcca gtttatactc agcctgtttg ttttgcacca |
| 3061 | aatatgatgt atccagtccc agtgagccca ggcgtgcaac ctttataccc aatacctatg |
| 3121 | acgcccatgc cagtgaatca agccaagaca tatagagcag taccaaatat gccccaacag |
| 3181 | cggcaagacc agcatcatca gagtgccatg atgcacccag cgtcagcagc gggcccaccg |
| 3241 | attgcagcca ccccaccagc ttactccacg caatatgttg cctacagtcc tcagcagttc |
| 3301 | ccaaatcagc cccttgttca gcatgtgcca cattatcagt ctcagcatcc tcatgtctat |
| 3361 | agtcctgtaa tacagggtaa tgctagaatg atggcaccac caacacacgc ccagcctggt |
| 3421 | ttagtatctt cttcagcaac tcagtacggg gctcatgagc agacgcatgc gatgtatgca |
| 3481 | tgtcccaaat taccatacaa caaggagaca agcccttctt tctactttgc catttccacg |
| 3541 | ggctcccttg ctcagcagta tgcgcaccct aacgctaccc tgcacccaca tactccacac |
| 3601 | cctcagcctt cagctacccc cactggacag cagcaaagcc aacatggtgg aagtcatcct |
| 3661 | gcacccagtc ctgttcagca ccatcagcac caggccgccc aggctctcca tctggccagt |
| 3721 | ccacagcagc agtcagccat ttaccacgcg gggcttgcgc caactccacc ctccatgaca |
| 3781 | cctgcctcca acacgcagtc gccacagaat agtttcccag cagcacaaca gactgtcttt |
| 3841 | acgatccatc cttctcacgt tcagccggcg tataccaacc caccccacat ggcccacgta |
| 3901 | cctcaggctc atgtacagtc aggaatggtt ccttctcatc caactgccca tgcgccaatg |
| 3961 | atgctaatga cgacacagcc acccggcggt ccccaggccg ccctcgctca aagtgcacta |
| 4021 | cagcccattc cagtctcgac aacagcgcat ttcccctata tgacgcaccc ttcagtacaa |
| 4081 | gcccaccacc aacagcagtt gtaaggctgc cctggaggaa ccgaaaggcc aaattccctc |
| 4141 | ctcccttcta ctgcttctac caactggaag cacagaaaac tagaatttca tttattttgt |
| 4201 | ttttaaaata tatatgttga tttcttgtaa catccaatag gaatgctaac agttcacttg |
| 4261 | cagtggaaga tacttggacc gagtagaggc atttaggaac ttgggggcta ttccataatt |
| 4321 | ccatatgctg tttcagagtc ccgcaggtac cccagctctg cttgccgaaa ctggaagtta |
| 4381 | tttatttttt aataaccctt gaaagtcatg aacacatcag ctagcaaaag aagtaacaag |
| 4441 | agtgattctt gctgctatta ctgctaaaaa aaaaaaaaaa aaaaaatcaa gacttggaac |
| 4501 | gcccttttac taaacttgac aaagtttcag taaattctta ccgtcaaact gacggattat |
| 4561 | tatttataaa tcaagtttga tgaggtgatc actgtctaca gtggttcaac ttttaagtta |
| 4621 | agggaaaaac ttttactttg tagataatat aaaataaaaa cttaaaaaaa atttaaaaaa |
| 4681 | taaaaaaagt tttaaaaact gaaaaaaaaa aa |

SEQ ID NO: 2
Reverse complement of SEQ ID NO: 1
tttttttttttcagtttttaaaactttttttattttttaaattttttttaagtttttattttatattatc
tacaaagtaaaagtttttcccttaacttaaaagttgaaccactgtagacagtgatcacctcatcaaactt
gatttataaataataatccgtcagtttgacggtaagaatttactgaaactttgtcaagtttagtaaaagg
gcgttccaagtcttgatttttttttttttttttttttagcagtaatagcagcaagaatcactcttgttac
ttcttttgctagctgatgtgttcatgactttcaagggttattaaaaaataaataacttccagtttcggca
agcagagctggggtacctgcgggactctgaaacagcatatggaattatggaatagcccccaagttcctaa
atgcctctactcggtccaagtatcttccactgcaagtgaactgttagcattcctattggatgttacaaga
aatcaacatatatattttaaaaacaaaataaatgaaattctagttttctgtgcttccagttggtagaagc
agtagaagggaggagggaatttggcctttcggttcctccagggcagccttacaactgctgttggtggtgg
gcttgtactgaagggtgcgtcatataggggaaatgcgctgttgtcgagactggaatgggctgtagtgcac
tttgagcgagggcggcctggggaccgccgggtggctgtgtcgtcattagcatcattggcgcatgggcagt
tggatgagaaggaaccattcctgactgtacatgagcctgaggtacgtgggccatgtggggtgggttggta
tacgccggctgaacgtgagaaggatggatcgtaaagacagtctgttgtgctgctgggaaactattctgtg
gcgactgcgtgttggaggcaggtgtcatggagggtggagttggcgcaagccccgcgtggtaaatggctga
ctgctgctgtggactggccagatggagagcctgggcggcctggtgctgatggtgctgaacaggactgggt
gcaggatgacttccaccatgttggctttgctgctgtccagtgggggtagctgaaggctgagggtgtggag
tatgtgggtgcagggtagcgttagggtgcgcatactgctgagcaagggagcccgtggaaatggcaaagta
gaaagaagggcttgtctccttgttgtatggtaatttgggacatgcatacatcgcatgcgtctgctcatga
gccccgtactgagttgctgaagaagatactaaaccaggctgggcgtgtgttggtggtgccatcattctag
cattaccctgtattacaggactatagacatgaggatgctgagactgataatgtggcacatgctgaacaag
gggctgatttgggaactgctgaggactgtaggcaacatattgcgtggagtaagctggtggggtggctgca
atcggtgggcccgctgctgacgctgggtgcatcatggcactctgatgatgctggtcttgccgctgttggg
gcatatttggtactgctctatatgtcttggcttgattcactggcatgggcgtcataggtattgggtataa
aggttgcacgcctgggctcactgggactggatacatcatatttggtgcaaaacaaacaggctgagtataa
actggagttggctgttgatgacccaccatagatgggctaggttgtgcttgaggccgaggtgaagttgggg
tagtagaaggctttggctgagagaaggaacgtgggttgaactcctttgcattgggattcaatgttgattt
cctaacttgctcagctgcgtctttcttctcttccttatcgtctttctcttgtttacatgctgggctggaa
gtctgaaccccttgggaagtgacctcaggtcccctcttgtgctccgtgttactaagtattgaaggggaaa
tgctggggctattcggcttgctgctgccactggtacagttgctgctgctattttcaatgaaagaatcctt
agcacttggttcaattttgtctttgatcaaatctcttgatttttctccctctctatttttgtttagtagt
tgatccatagattcagaagtagaacttggctgtaacctaaaatcattcttaaatttctttaaatcatcaa
tctgttttctatgttcagaaacaactggtgatatacctttgttttcagcttttgagaagctaggtgatgt
ttcattgggtttaatattttctttattccctgcaggagagttctgcctctgatcttgaagcctggaatct
ttagcctcactagaaggggtaacagctctgttcgatgcaggactagcaggcgtaggagatgcagctggaa
taggcatggcaacagcttcagttggaataataccagcttggggagaagcaagaactggcccactgggggt
atttccaatactgttctgtctgggagacctgggtctatgagttttaggggataatcttggaaccccactg
accactgatgaccacgttccccccgagggactggtccttgctactggaggagtagctgcttcactgggtg
ggttgtgggatacaaattctaggccactggatatggaacccctcccagcagaaactctgtgatttcgagg
atgtcgctgggcctttggggacatccttggaggcccttctgaagacatgcgtttaggcatagtagagaca
ggagctggagaaccatgagcagaggggtgagacgggggtctggatggccgcgaggggggcctggagggcg
gccgtgtaggggtggctgcccgaggtggaagagagttgggacctgactggtagcgagaaggtgggcgaga
ggaaggagatgggcaaggcgatggccagggaacacctccattaactactctttggtctgaaccagaattc
gggttgaaatctgaagtgtgagaagtggatcttgatggcatggagcccgatccaggctggcccatacgcg
gtgaattctgtctcccacttccccaggatatgacttctctatttctttgtccaggaggaatatatttatt
ttccctagtgtttatgctgtgcccctcacgttcactggaatttctctgaactgctgtgtatttttcttcc
tcactcctatcatcattttccagggccactcgagctttgtactgggcacttgactcaatttcttctgcta
actggtttgcccttgcttcccgttttaaaaattcttctgagttatctctttctaagggcactgtatacga
agataaactgctatcatacgtagacactacaccataattttcttcattatatcgaaacatatcattggga
tcccatccattagatacgtcattttccaaagcctcaagttcctcattggctgtgagttcacctgcatccc
agggctccaggtccttctctttgtgttcgccattcactttagcactgatagcagagtcagtaaaagcatc
tctttttgcataactggagtccatatctttaaactgtaccacaacaaagtctgaacatttgaacaaaata
ctctccattatttcttcacgtttcggccccgaactggattctgtacttttctcatgtgcggcatcaagta
ccaaatcacacttcggactgtaagttttaaaaactccttcatatatacctccatttttcacttgtacttc
acatttggagccaacaactgatgtaagtatatgaaccatcctcatatttgcatagattccatcaaaagaa
atcgtagactgaggcagtcctttgttactgtttcgacctctgcccaggccgggcctcccgccgccggagg
tcgccgcgaccaccgaggagggagccgtggccgaggacgaggagaccgaggacgaggacggcgaaggcgc
ggcggcgggcgacgctagaaggccgctgccgccgggcttgcggacattggcagccgcgggcggcggctgc
tgctgctgctgctgctgctgctgttgctgctgctgctgctgctgctgctgctgctgctgctgctggggct
tcagcgacatggtgaggggcccatacaccggctcgcacgccgggcggggacagccgggagccgggcgcgc
caaggagacgccggaacgcggcggggacgcgcgggcgccgagcggggaggcgcgggttggcgcggccgga
ggggcgcccgggctggcgagggggagaaggaggacgacgaaggggcggggaggcccgccgagaccaagga
gccgccgggagccgggccgaaacgcgccgccgccgttgccgttgctaccaaaacagtctgaggcggaggg
aggcgagctctgccgggagggaggggggccggggccgggcgggggaggggcggcggagggatacggtccc
ggggccgcgccaccgccgccccgcccgctccgccgcgccggccgctggagcgagcgccacccgggccacc
tggctgcggcgaagcggcgagactcggtggccaccgcgggactccgaggagctgcggccgctgagcgcat
cggagggcgggcgcgccgaggcgccgggtgggagcggaggtgcggatagggactctttaccggaagtcgg
aggggtcagacggaagcagaacgtgaggtggccccggggccgggagggacacgtgaggagcgggcggcgc
gctgggttgctttctcgggggt
SEQ ID NO: 3

| | |
|---|---|
| LOCUS | XM_005572266 4666 bp mRNA linear PRI 19-SEP-2013 |
| DEFINITION PREDICTED: | Macaca fascicularis uncharacterized LOC101926470, transcript |
| | variant X1, mRNA. |
| VERSION | XM_005572266.1 |

| | |
|---|---|
| 1 | cgcgaaagcg gcccagcgcg gcgccctcac gtgtccctcc cggccccggg gccactcacg |
| 61 | ttctgcttcc gcccgacccc tccgacttcc ggtaaagagt ccctaccgca cctccgcgct |
| 121 | cccccggcgc ctcggcgcgc ccggcctccg atgcgctcag tggccgcagc tcctcggagt |
| 181 | cccgtggcgg gcaccaagtc tcgccccttc gccgcagcca actggcccgg gtggcgctcg |
| 241 | ctccagcggc cggcgcagcg gaacgggcgg ggcggcggtg gcgcggcctc tggacagtat |
| 301 | ccctccgccg cccctccccc gcccggccct ggcccccctc cctcccggca gcgctcgcct |
| 361 | ccctccgcct cagactgttt tggttgcaac ggcaacggcg gtggcgcgtt ccggcccggc |
| 421 | tccccgcagc tcctcggtct cggcgggcct ccccgcccct tcgtcgtcct ccttctcccc |
| 481 | cgcggcagcc cgggtgcccc cccggccgcg ccaacccgcg cctccctgct cggcgcccgc |
| 541 | gcgtccccgc cgcgctccgg cgtctcctcg gcgcgcccgg ctcccggctg tccccgcccg |
| 601 | gcgtgcgagc cggtgtatgg gcccctcacc atgtcgctga agccccagca gcagcagcag |
| 661 | cagcagcaac agcagcagca gcagcagcag cagccgcccg cggctgccaa tgtccgcaag |
| 721 | cccggcggca gcggccttct agcgtcgccc gccgcctcgc cttcgccgtc gtcgtcctcg |
| 781 | gtctcctcgt cctcggccac gactccctcc tcggcggccg cggcgacctc cggcggcggt |
| 841 | aggcccggcc tgggcagagg tcgaaacagt aacaaaggac tgcctcagtc tacgatttct |
| 901 | tttgacggaa tctatgcaaa tatgaggatg gttcatatac ttacatcagt tgttggctcc |
| 961 | aaatgtgaag tacaagtgaa aaatggaggt atatatgaag gagtttttaa aacctacagt |
| 1021 | ccgaagtgtg atttggtact tgatgccgca catgagaaaa gtacagaatc cagttcgggg |
| 1081 | ccaaaacgtg aagaaataat ggagagtatc ttgttcaaat gttcagactt tgttgtggta |
| 1141 | cagtttaaag atatggactc cagttatgca aaaagagatg cttttactga ctctgctatc |
| 1201 | agtgctaaag tgaacggcga acacaaagag aaggacctgg agccctggga tgcaggcgaa |
| 1261 | ctcacagcca atgaggaact tgaggctttg gaaaatgacg tatctaatgg atgggatccc |
| 1321 | aatgatatgt ttcgatataa tgaagaaaat tatggtgtag tgtctacata tgatagcagt |
| 1381 | ttatcttcat atacggtgcc cttagaaaga gataactcag aagaattttt aaaacgggaa |
| 1441 | gcaagggcaa accagttagc agaagaaatt gagtcaagtg cccagtacaa agctcgagtg |
| 1501 | gccctggaaa atgatgatag gagtgaggaa gaaaaataca cagcagttca gagaaattcc |
| 1561 | agtgaacgtg aggggcacag cataaacact agggaaaata aatatattcc tcctggacaa |
| 1621 | agaaatagag aagtcatatc ctggggaagt gggagacaga attcaccgcg tatgggccag |
| 1681 | cctggatcgg gctccatgcc atcaagatcc acttctcaca cttcagattt caacccgaat |
| 1741 | tcttgttcag accaaagagt agttaatgga ggtgttccct ggccatcgcc ttgcccatct |
| 1801 | ccttcctctc gcccaccttc tcgctaccag tcaggtccca actctcttcc acctcgggca |
| 1861 | gccaccccta cacggccgcc ctccaggccc ccctcgcggc catccagacc cccgtctcac |
| 1921 | ccctctgctc atggttctcc agctcctgtc tctactatgc ctaaacgcat gtcttcagaa |
| 1981 | gggcctccaa ggatgtcccc aaaggcccag cgacatcctc gaaatcacag agtttctgct |
| 2041 | gggaggggtt ccatatccag tggcctagag tttgtatccc acaacccacc cagtgaagca |
| 2101 | gctactcctc cagtagcaag gaccagtccc tcggggggaa cgtggtcatc agtggtcagt |
| 2161 | ggggttccaa gattatcccc taaaactcat agacccaggt ctcctagaca gaacagtatt |
| 2221 | ggaaataccc ccagtgggcc agttcttgct tctccccaag ctggtattat tccaactgaa |
| 2281 | gctgttgcca tgcctattcc agctgcatct cctacgcctg ctagtcctgc atcgaacaga |
| 2341 | gctgttaccc cttctagtga ggctaaagat tccagacttc aagatcaaag gcagaactct |
| 2401 | cctgcaggga ataaagaaaa tattaagccc aatgaaacat cacctagctt ctcaaaagct |
| 2461 | gaaaacaaag gtatatcacc aattgtttct gaacatagaa aacagattga tgatttaaag |
| 2521 | aaatttaaga atgattttag gttacagcca agttctactt ctgaatctat ggatcaacta |
| 2581 | ctaaacaaaa atagagaggc agaaaaatca agagatttga tcaaagacaa aattgaacca |
| 2641 | agtgctaagg attctttcac tgaaaatagc agcagcaact gtaccagtgg cagcagcaag |
| 2701 | ccgaatagcc ccagcatttc cccttcaata cttagtaaca cggagcacaa gaggggacct |
| 2761 | gaggtcactt cccaaggggt tcagacttcc agtccagcat gtaaacaaga gaaagatgat |
| 2821 | aaggaagaga agaaagacgc agctgagcaa gttaggaaat caacattgaa tcctaatgca |
| 2881 | aaggagttca acccacgttc cttctctcag ccaaagcctt ctactacccc aacttcacct |
| 2941 | cggcctcaag cacaacctag cccatctatg gtgggtcatc aacagccaac tccagtttat |
| 3001 | actcagcctg tttgttttgc accaaatatg atgtatccag tcccagtgag cccaggcgtg |
| 3061 | caacctttgt acccaatacc tatgacgccc atgccagtga atcaagccaa gacatataga |
| 3121 | gcagtaccaa atatgcccca acagcggcaa gaccagcatc atcagagtgc catgatgcat |
| 3181 | ccagcgtcag cagcgggccc accgattgca gccaccccac cagcttactc cacgcaatat |
| 3241 | gttgcctaca gtcctcagca gttcccaaat cagccccttg ttcagcatgt gccacattat |
| 3301 | cagtctcagc atcctcatgt ctatagtcct gtaatacagg gtaatgctag aatgatggca |
| 3361 | ccaccaacac atgcccagcc tggtttagtg tcttcttcag caactcagta cggggctcat |
| 3421 | gagcagacgc atgcgatgta tgcatgtccc aaattaccat acaacaagga gacaagccct |
| 3481 | tctttctact ttgccatttc cacgggctcc cttgctcagc agtatgcgca ccctaacgct |
| 3541 | accctgcacc cacatactcc acaccctcag ccttcagcta cccccactgg acagcagcaa |
| 3601 | agccaacatg gtggaagtca tcctgcaccc agccctgttc agcaccatca gcaccaggcc |
| 3661 | gcccaggctc tccatctggc cagtccacag cagcagtcag ccatttacca cgcggggctt |
| 3721 | gcaccaactc caccctccat gacacctgcc tccaacacgc agtcgccaca gaatagtttc |
| 3781 | ccagcagcac aacagaccgt ctttacgatc catccttctc acgttcagcc ggcgtatacc |
| 3841 | aacccacccc acatggccca cgtacctcag gctcatgtac agtcaggaat ggttccttct |
| 3901 | catccaactg cccatgcgcc aatgatgcta atgacgacac agccacccgg cggtccccag |
| 3961 | gccgccctcg ctcaaagtgc actacagccc attccagtct cgacaactgc gcatttcccc |
| 4021 | tatatgacgc acccttcagt acaagcccac caccaacagc agttgtaagg ctgccctgga |
| 4081 | ggaaacgaaa ggccaaattc cctcctccct tctactgctt ctaccaactg gaagcacaga |
| 4141 | aaactagaat ttcatttatt ttgtttttaa aatatatatg ttgatttctt gtaacatcca |
| 4201 | ataggaatgc taacagttca cttgcagtgg aagatatttg gaccgagtag aggcatttag |
| 4261 | gaacttgggg gctattccat aattccatac gctgtttcag agtcccacag gtaccccagc |
| 4321 | tctgcttgcc gaaactggaa gttatttatt ttttaataac ccttgaaagt catgaacaca |
| 4381 | tcagctagca aaagaagtaa caagagtgat tcttgctgct attactgctt aaaaaaaaaa |
| 4441 | aaaaaaaaaa tcaagacttg gaacgccctt ttactaaact tgacaaaggt tcagtaaatt |
| 4501 | cttaccgtca aactgacgga ttattattta taaatcaagt ttgatgaggt gatcactgtc |
| 4561 | tacagtggtt caacttttaa gttaagggaa aaacttttac tttgtagata atataaaata |
| 4621 | aaaactttaa aaaaatttaa aaaataaaaa aagttttaaa aactga |

SEQ ID NO: 4
Reverse complement of SEQ ID NO: 3
tcagtttttaaaactttttttattttttaaatttttttaaagtttttattttatattatctacaaagtaa
aagtttttcccttaacttaaaagttgaaccactgtagacagtgatcacctcatcaaacttgatttataaa
taataatccgtcagtttgacggtaagaatttactgaacctttgtcaagtttagtaaaagggcgttccaag
tcttgattttttttttttttttttttaagcagtaatagcagcaagaatcactcttgttacttcttttgct
agctgatgtgttcatgactttcaagggttattaaaaaataaataacttccagtttcggcaagcagagctg
gggtacctgtgggactctgaaacagcgtatggaattatggaatagcccccaagttcctaaatgcctctac
tcggtccaaatatcttccactgcaagtgaactgttagcattcctattggatgttacaagaaatcaacata
tatattttaaaaacaaaataaatgaaattctagttttctgtgcttccagttggtagaagcagtagaaggg
aggagggaatttggcctttcgtttcctccagggcagccttacaactgctgttggtggtgggcttgtactg
aagggtgcgtcatataggggaaatgcgcagttgtcgagactggaatgggctgtagtgcactttgagcgag
ggcggcctggggaccgccgggtggctgtgtcgtcattagcatcattggcgcatgggcagttggatgagaa
ggaaccattcctgactgtacatgagcctgaggtacgtgggccatgtggggtgggttggtatacgccggct
gaacgtgagaaggatggatcgtaaagacggtctgttgtgctgctgggaaactattctgtggcgactgcgt
gttggaggcaggtgtcatggagggtggagttggtgcaagccccgcgtggtaaatggctgactgctgctgt
ggactggccagatggagagcctgggcggcctggtgctgatggtgctgaacagggctgggtgcaggatgac
ttccaccatgttggctttgctgctgtccagtgggggtagctgaaggctgagggtgtggagtatgtgggtg
cagggtagcgttagggtgcgcatactgctgagcaagggagcccgtggaaatggcaaagtagaaagaaggg
cttgtctccttgttgtatggtaatttgggacatgcatacatcgcatgcgtctgctcatgagccccgtact
gagttgctgaagaagacactaaaccaggctgggcatgtgttggtggtgccatcattctagcattaccctg
tattacaggactatagacatgaggatgctgagactgataatgtggcacatgctgaacaaggggctgattt
gggaactgctgaggactgtaggcaacatattgcgtggagtaagctggtggggtggctgcaatcggtgggc
ccgctgctgacgctggatgcatcatggcactctgatgatgctggtcttgccgctgttggggcatatttgg
tactgctctatatgtcttggcttgattcactggcatgggcgtcataggtattgggtacaaaggttgcacg
cctgggctcactgggactggatacatcatatttggtgcaaaacaaacaggctgagtataaactggagttg
gctgttgatgacccaccatagatgggctaggttgtgcttgaggccgaggtgaagttggggtagtagaagg
ctttggctgagagaaggaacgtgggttgaactcctttgcattaggattcaatgttgatttcctaacttgc
tcagctgcgtctttcttctcttccttatcatctttctcttgtttacatgctggactggaagtctgaaccc
cttgggaagtgacctcaggtcccctcttgtgctccgtgttactaagtattgaaggggaaatgctggggct
attcggcttgctgctgccactggtacagttgctgctgctattttcagtgaaagaatccttagcacttggt
tcaattttgtctttgatcaaatctcttgatttttctgcctctctatttttgtttagtagttgatccatag
attcagaagtagaacttggctgtaacctaaaatcattcttaaatttctttaaatcatcaatctgttttct
atgttcagaaacaattggtgatatacctttgttttcagcttttgagaagctaggtgatgtttcattgggc
ttaatattttctttattccctgcaggagagttctgcctttgatcttgaagtctggaatctttagcctcac
tagaaggggtaacagctctgttcgatgcaggactagcaggcgtaggagatgcagctggaataggcatggc
aacagcttcagttggaataataccagcttggggagaagcaagaactggcccactgggggtatttccaata
ctgttctgtctaggagacctgggtctatgagttttaggggataatcttggaaccccactgaccactgatg
accacgttccccccgagggactggtccttgctactggaggagtagctgcttcactgggtgggttgtggga
tacaaactctaggccactggatatggaacccctcccagcagaaactctgtgatttcgaggatgtcgctgg
gcctttggggacatccttggaggcccttctgaagacatgcgtttaggcatagtagagacaggagctggag
aaccatgagcagaggggtgagacgggggtctggatggccgcgaggggggcctggagggcggccgtgtagg
ggtggctgcccgaggtggaagagagttgggacctgactggtagcgagaaggtgggcgagaggaaggagat
gggcaaggcgatggccagggaacacctccattaactactctttggtctgaacaagaattcgggttgaaat
ctgaagtgtgagaagtggatcttgatggcatggagcccgatccaggctggcccatacgcggtgaattctg
tctcccacttccccaggatatgacttctctatttctttgtccaggaggaatatatttattttccctagtg
tttatgctgtgcccctcacgttcactggaatttctctgaactgctgtgtatttttcttcctcactcctat
catcattttccagggccactcgagctttgtactgggcacttgactcaatttcttctgctaactggtttgc
ccttgcttcccgttttaaaaattcttctgagttatctctttctaagggcaccgtatatgaagataaactg
ctatcatatgtagacactacaccataattttcttcattatatcgaaacatatcattgggatcccatccat
tagatacgtcattttccaaagcctcaagttcctcattggctgtgagttcgcctgcatcccagggctccag
gtccttctctttgtgttcgccgttcactttagcactgatagcagagtcagtaaaagcatctctttttgca
taactggagtccatatctttaaactgtaccacaacaaagtctgaacatttgaacaagatactctccatta
tttcttcacgttttggccccgaactggattctgtacttttctcatgtgcggcatcaagtaccaaatcaca
cttcggactgtaggttttaaaaactccttcatatatacctccatttttcacttgtacttcacatttggag
ccaacaactgatgtaagtatatgaaccatcctcatatttgcatagattccgtcaaaagaaatcgtagact
gaggcagtcctttgttactgtttcgacctctgcccaggccgggcctaccgccgccggaggtcgccgcggc
cgccgaggagggagtcgtggccgaggacgaggagaccgaggacgacgacggcgaaggcgaggcggcgggc
gacgctagaaggccgctgccgccgggcttgcggacattggcagccgcgggcggctgctgctgctgctgct
gctgctgttgctgctgctgctgctgctgctggggcttcagcgacatggtgaggggcccatacaccggctc
gcacgccgggcggggacagccgggagccgggcgcgccgaggagacgccggagcgcggcggggacgcgcgg
gcgccgagcagggaggcgcgggttggcgcggccgggggggcacccgggctgccgcgggggagaaggagga
cgacgaaggggcggggaggcccgccgagaccgaggagctgcggggagccgggccggaacgcgccaccgcc
gttgccgttgcaaccaaaacagtctgaggcggagggaggcgagcgctgccgggagggaggggggccaggg
ccgggcgggggaggggcggcggagggatactgtccagaggccgcgccaccgccgccccgcccgttccgct
gcgccggccgctggagcgagcgccacccgggccagttggctgcggcgaaggggcgagacttggtgcccgc
cacgggactccgaggagctgcggccactgagcgcatcggaggccgggcgcgccgaggcgccgggggagcg
cggaggtgcggtagggactctttaccggaagtcggaggggtcgggcggaagcagaacgtgagtggccccg
gggccgggagggacacgtgagggcgccgcgctgggccgctttcgcg
SEQ ID NO: 5

| | |
|---|---|
| LOCUS | NM_009125 4505 bp mRNA linear ROD 17-FEB-2019 |
| DEFINITION | Mus musculus ataxin 2 (Atxn2), transcript variant 1, mRNA. |
| VERSION | NM_009125.2 |

| | |
|---|---|
| 1 | ccgtccgcgt ccgccagccc gggtcccatg cgttcgtcca ccgccgccgc tcagcggccc |
| 61 | gcggcggggg accccgagcc gcgccgcccg gcgggctggg ccgcgcggcg ctcgctcccg |
| 121 | cggacggcgc ggcgcggcgg gcggggcggc gcggtggcgt atccctccgc cggccctccc |
| 181 | ccgcgcggcc ccggcgcccc tccccgcggg ccgcgctcgc caccctgcgc ctcagactgt |
| 241 | tttggtagca acggccacgg cgcgtcccgg cccggctccc ggcggctgct cggtgtctgc |
| 301 | gggcctcccc gccccttcgt cgttgtcctg ctgcctctgg cccccgcggc cacgccggcc |
| 361 | cgcgcctgcc cgcccggcgt ccgcgcgtcc ccgccgcgct ccggcgtctc ctcctcggcg |
| 421 | cgcccggcac ccggctgtcc ccgcccggcg tgcgagccgg tgtatgggcc gctcaccatg |
| 481 | tcgctgaagc cgcagccgca gccgcccgcg cccgccactg gccgcaagcc cggcggcggc |
| 541 | ctgctctcgt cgcccggcgc cgcgccggcc tcggccgcgg tgacctcggc ttccgtggtg |
| 601 | ccggccccgg ccgcgccggt ggcgtcttcc tcggcggccg cgggcggcgg gcgtcccggc |
| 661 | ctgggcagag gtcggaacag tagcaaagga ctgcctcagc ctacgatttc ttttgatgga |
| 721 | atctatgcaa acgtgaggat ggttcatata cttacgtcag ttgttggatc gaaatgtgaa |
| 781 | gtacaagtga aaaacggagg catatatgaa ggagttttta aaacatacag tcctaagtgt |
| 841 | gacttggtac ttgatgctgc acatgagaaa agtacagaat ccagttcggg gccaaaacgt |
| 901 | gaagaaataa tggagagtgt tttgttcaaa tgctcagact tcgttgtggt acagtttaaa |
| 961 | gatacagact ccagttatgc acggagagat gcttttactg actctgctct cagcgcaaag |
| 1021 | gtgaatggtg agcacaagga gaaggacctg gagccctggg atgcagggga gctcacggcc |
| 1081 | agcgaggagc tggagctgga gaatgatgtg tctaatggat gggaccccaa tgacatgttt |
| 1141 | cgatataatg aagagaatta tggtgtggtg tccacatatg atagcagttt atcttcatat |
| 1201 | acggttcctt tagaaaggga caactcagaa gaatttctta aacgggaggc aagggcaaac |
| 1261 | cagttagcag aagaaattga atccagtgct cagtacaaag ctcgtgtcgc ccttgagaat |
| 1321 | gatgaccgga gtgaggaaga aaaatacaca gcagtccaga gaaactgcag tgaccgggag |
| 1381 | gggcatggcc ccaacactag ggacaataaa tatattcctc ctggacaaag aaacagagaa |
| 1441 | gtcctatcct ggggaagtgg gagacagagc tcaccacgga tgggccagcc tgggccaggc |
| 1501 | tccatgccgt caagagctgc ttctcacact tcagatttca acccgaacgc tggctcagac |
| 1561 | caaagagtag ttaatggagg tgttccctgg ccatcgcctt gcccatctcc ttcctctcgc |
| 1621 | ccaccttctc gctaccagtc aggtcccaac tctcttccac ctcgggcagc cacccctaca |
| 1681 | cggccgccct ccaggccccc ctcgaggccc tccagacccc cgtctcaccc ctctgctcat |
| 1741 | ggttctccag ctcctgtctc tactatgcct aaacgcatgt cttcagaagg acccccaagg |
| 1801 | atgtctccaa aggcacagcg ccaccctcgg aatcacagag tctctgctgg gagaggctcc |
| 1861 | atgtctagtg gcctagaatt tgtatcccac aatcccccaa gtgaagcagc tgctcctcca |
| 1921 | gtggcaagga ccagtcctgc agggggaacg tggtcctcag tggtcagtgg ggttccaagg |
| 1981 | ttatctccca aaactcacag acccaggtct cccaggcaga gcagcattgg aaactctccc |
| 2041 | agcgggcctg tgcttgcttc tccccaagct ggcatcatcc ctgcagaagc cgtttccatg |
| 2101 | cctgttcccg ccgcatctcc gactcctgcc agccctgcat ccaacagagc actgacccca |
| 2161 | tctattgagg caaaagattc caggcttcaa gatcagaggc agaactctcc tgcagggagt |
| 2221 | aaagaaaatg ttaaagcaag tgaaacatca cctagctttt caaaagctga caacaaaggt |
| 2281 | atgtcaccag ttgtttctga acacagaaaa cagattgatg acttaaagaa gtttaagaat |
| 2341 | gattttaggt tacagccaag ctctacatct gaatctatgg atcaactact aagcaaaaat |
| 2401 | agagaaggag aaaagtcacg agatttgatt aaagataaaa cggaagcaag tgctaaggat |
| 2461 | agtttcattg acagcagcag cagcagcagc aactgtacca gtggcagcag caagaccaac |
| 2521 | agccctagca tctccccttc catgcttagt aatgcagagc acaagagggg gcctgaggtc |
| 2581 | acatcccaag gggtgcagac ttccagccca gcctgcaaac aagagaagga tgacagagaa |
| 2641 | gagaagaaag acacaacaga gcaggttagg aaatcgacat tgaatcccaa tgcaaaggag |
| 2701 | ttcaaccctc gttctttctc tcagccaaag ccttctacta ccccaacgtc acctcggcct |
| 2761 | caagcacaac ccagcccatc tatggtgggt catcagcagc cagctccagt gtacactcag |
| 2821 | cctgtgtgct tcgcacccaa tatgatgtat cccgtcccag tgagcccggg cgtacaacct |
| 2881 | ttatacccaa tacctatgac gcccatgcct gtgaaccaag ccaagacata tagagcaggt |
| 2941 | aaagtaccaa atatgcccca acagcgacaa gaccaacatc atcaaagcac catgatgcac |
| 3001 | ccagcctccg cggcagggcc acccatcgta gccaccccgc ccgcttactc cactcagtac |
| 3061 | gttgcctaca gccctcagca gtttcccaat cagcctttgg tccagcatgt gccgcattat |
| 3121 | cagtctcagc atcctcatgt gtacagtcct gtcatacaag gtaatgccag gatgatggca |
| 3181 | ccaccagcac atgctcagcc tggtttagtg tcttcttcag ctgctcagtt cggggctcac |
| 3241 | gagcagacgc acgccatgta tgcatgtccc aaattaccat acaacaagga gacaagccct |
| 3301 | tctttctact ttgccatttc caccggctcc ctcgctcagc agtatgcaca tcctaatgcc |
| 3361 | gccctgcatc cacatactcc ccatcctcag ccttcggcca ctcccaccgg acagcagcaa |
| 3421 | agccagcatg gtggaagtca ccctgcaccc agtcctgttc agcaccatca gcaccaggct |
| 3481 | gcccaggctc ttcatctggc cagtccacag cagcagtcgg ccatttatca tgcggggctg |
| 3541 | gcaccaacac caccttccat gacacctgcc tctaatacac agtctccaca gagcagtttc |
| 3601 | ccagcagcac aacagacagt cttcaccatc cacccttctc atgttcagcc ggcatacacc |
| 3661 | accccacccc acatggccca cgtacctcag gctcatgtac agtcaggaat ggttccttct |
| 3721 | catccaactg cccatgcgcc aatgatgcta atgacgacac agccacccgg cggtccccag |
| 3781 | gccgccctcg ctcaaagtgc actacagccc attccagtct cgacaacagc gcatttccct |
| 3841 | tatatgacgc acccttcagt acaagcccac caccaacagc agttgtaagg ctgccctgga |
| 3901 | ggaaccgaaa ggccaaatcc cctcctccct tctcctgctt ctgccaaccg gaagcacaga |
| 3961 | aaactagaac ttcattgatt ttgtttttta aaagatacac tgatttaaca tctgatagga |
| 4021 | atgctaacag ctcacttgca gtggaggatg ttttggaccg agtagaggca tgtagggact |
| 4081 | tgtggctgtt ccataattcc atgtgctgtt gcagggtcct gcaagtaccc agctctgctt |
| 4141 | gctgaaactg gaagttattt attttttaat ggcccttgag agtcatgaac acatcagcta |
| 4201 | gcaacagaag taacaagagt gattcttgct gctattaccg ctttaaaaaa aaaaaatcaa |
| 4261 | gacttggaac gcccttttac taaacttgac agaagttcag taaattctta ccgccaaact |
| 4321 | gacggattat tatttataaa tcaagtttga tgaggcgatc actgtctaca gtggttcaac |
| 4381 | ttttaagtta agggaaaact tttactttgt agataatata aaataaaaac taaaaaaaaa |
| 4441 | aattaaaaaa taaaaaaagt tttaaaaact gaaaaaaaaa aaaaaaaaaa aaaaaaaaaa |
| 4501 | aaaaa |

SEQ ID NO: 6
Reverse complement of SEQ ID NO: 5
ttttttttttttttttttttttttttttttttttcagtttttaaaactttttttattttttaattttttt
ttttagtttttattttatattatctacaaagtaaaagttttcccttaacttaaaagttgaaccactgtag
acagtgatcgcctcatcaaacttgatttataaataataatccgtcagtttggcggtaagaatttactgaa
cttctgtcaagtttagtaaaagggcgttccaagtcttgattttttttttttaaagcggtaatagcagcaa
gaatcactcttgttacttctgttgctagctgatgtgttcatgactctcaagggccattaaaaaataaata
acttccagtttcagcaagcagagctgggtacttgcaggaccctgcaacagcacatggaattatggaacag
ccacaagtccctacatgcctctactcggtccaaaacatcctccactgcaagtgagctgttagcattccta
tcagatgttaaatcagtgtatcttttaaaaaacaaaatcaatgaagttctagttttctgtgcttccggtt
ggcagaagcaggagaagggaggaggggatttggcctttcggttcctccagggcagccttacaactgctgt
tggtggtgggcttgtactgaagggtgcgtcatataagggaaatgcgctgttgtcgagactggaatgggct
gtagtgcactttgagcgagggcggcctggggaccgccgggtggctgtgtcgtcattagcatcattggcgc
atgggcagttggatgagaaggaaccattcctgactgtacatgagcctgaggtacgtgggccatgtggggt
ggggtggtgtatgccggctgaacatgagaagggtggatggtgaagactgtctgttgtgctgctgggaaac
tgctctgtggagactgtgtattagaggcaggtgtcatggaaggtggtgttggtgccagccccgcatgata
aatggccgactgctgctgtggactggccagatgaagagcctgggcagcctggtgctgatggtgctgaaca
ggactgggtgcagggtgacttccaccatgctggctttgctgctgtccggtgggagtggccgaaggctgag
gatggggagtatgtggatgcagggcggcattaggatgtgcatactgctgagcgagggagccggtggaaat
ggcaaagtagaaagaagggcttgtctccttgttgtatggtaatttgggacatgcatacatggcgtgcgtc
tgctcgtgagccccgaactgagcagctgaagaagacactaaaccaggctgagcatgtgctggtggtgcca
tcatcctggcattaccttgtatgacaggactgtacacatgaggatgctgagactgataatgcggcacatg
ctggaccaaaggctgattgggaaactgctgagggctgtaggcaacgtactgagtggagtaagcgggcggg
gtggctacgatgggtggccctgccgcggaggctgggtgcatcatggtgctttgatgatgttggtcttgtc
gctgttggggcatatttggtactttacctgctctatatgtcttggcttggttcacaggcatgggcgtcat
aggtattgggtataaaggttgtacgcccgggctcactgggacgggatacatcatattgggtgcgaagcac
acaggctgagtgtacactggagctggctgctgatgacccaccatagatgggctgggttgtgcttgaggcc
gaggtgacgttggggtagtagaaggctttggctgagagaaagaacgagggttgaactcctttgcattggg
attcaatgtcgatttcctaacctgctctgttgtgtctttcttctcttctctgtcatccttctcttgtttg
caggctgggctggaagtctgcaccccttgggatgtgacctcaggccccctcttgtgctctgcattactaa
gcatggaaggggagatgctagggctgttggtcttgctgctgccactggtacagttgctgctgctgctgct
gctgtcaatgaaactatccttagcacttgcttccgttttatctttaatcaaatctcgtgacttttctcct
tctctatttttgcttagtagttgatccatagattcagatgtagagcttggctgtaacctaaaatcattct
taaacttctttaagtcatcaatctgttttctgtgttcagaaacaactggtgacatacctttgttgtcagc
ttttgaaaagctaggtgatgtttcacttgctttaacattttctttactccctgcaggagagttctgcctc
tgatcttgaagcctggaatcttttgcctcaatagatggggtcagtgctctgttggatgcagggctggcag
gagtcggagatgcggcgggaacaggcatggaaacggcttctgcagggatgatgccagcttggggagaagc
aagcacaggcccgctgggagagtttccaatgctgctctgcctgggagacctgggtctgtgagttttggga
gataaccttggaaccccactgaccactgaggaccacgttccccctgcaggactggtccttgccactggag
gagcagctgcttcacttgggggattgtgggatacaaattctaggccactagacatggagcctctcccagc
agagactctgtgattccgagggtggcgctgtgcctttggagacatccttgggggtccttctgaagacatg
cgtttaggcatagtagagacaggagctggagaaccatgagcagaggggtgagacgggggtctggagggcc
tcgaggggggcctggagggcggccgtgtaggggtggctgcccgaggtggaagagagttgggacctgactg
gtagcgagaaggtgggcgagaggaaggagatgggcaaggcgatggccagggaacacctccattaactact
ctttggtctgagccagcgttcgggttgaaatctgaagtgtgagaagcagctcttgacggcatggagcctg
gcccaggctggcccatccgtggtgagctctgtctcccacttccccaggataggacttctctgtttctttg
tccaggaggaatatatttattgtccctagtgttggggccatgcccctcccggtcactgcagtttctctgg
actgctgtgtatttttcttcctcactccggtcatcattctcaagggcgacacgagctttgtactgagcac
tggattcaatttcttctgctaactggtttgcccttgcctcccgtttaagaaattcttctgagttgtccct
ttctaaaggaaccgtatatgaagataaactgctatcatatgtggacaccacaccataattctcttcatta
tatcgaaacatgtcattggggtcccatccattagacacatcattctccagctccagctcctcgctggccg
tgagctcccctgcatcccagggctccaggtccttctccttgtgctcaccattcacctttgcgctgagagc
agagtcagtaaaagcatctctccgtgcataactggagtctgtatctttaaactgtaccacaacgaagtct
gagcatttgaacaaaacactctccattatttcttcacgttttggccccgaactggattctgtacttttct
catgtgcagcatcaagtaccaagtcacacttaggactgtatgttttaaaaactccttcatatatgcctcc
gtttttcacttgtacttcacatttcgatccaacaactgacgtaagtatatgaaccatcctcacgtttgca
tagattccatcaaaagaaatcgtaggctgaggcagtcctttgctactgttccgacctctgcccaggccgg
gacgcccgccgcccgcggccgccgaggaagacgccaccggcgcggccggggccggcaccacggaagccga
ggtcaccgcggccgaggccggcgcggcgccgggcgacgagagcaggccgccgccgggcttgcggccagtg
gcgggcgcgggcggctgcggctgcggcttcagcgacatggtgagcggcccatacaccggctcgcacgccg
ggcggggacagccgggtgccgggcgcgccgaggaggagacgccggagcgcggcggggacgcgcggacgcc
gggcgggcaggcgcgggccggcgtggccgcgggggccagaggcagcaggacaacgacgaaggggcgggga
ggcccgcagacaccgagcagccgccgggagccgggccgggacgcgccgtggccgttgctaccaaaacagt
ctgaggcgcagggtggcgagcgcggcccgcggggaggggcgccggggccgcgcgggggagggccggcgga
gggatacgccaccgcgccgccccgcccgccgcgccgcgccgtccgcgggagcgagcgccgcgcggcccag
cccgccgggcggcgcggctcggggtcccccgccgcgggccgctgagcggcggcggtggacgaacgcatgg
gacccgggctggcggacgcggacgg
SEQ ID NO: 7

| | |
|---|---|
| LOCUS | XM_008769286 7067 bp mRNA linear ROD 26-JUL-2016 |
| DEFINITION PREDICTED: | Rattus norvegicus ataxin 2 (Atxn2), transcript variant |
| | X10, mRNA. |
| VERSION | XM_008769286.2 |

| | |
|---|---|
| 1 | caggctggcc tgtgcatttt aagtgctggg attaaaggtg tgtaccacga cacctgtttt |
| 61 | caatggttcc tttttacttt tctcttttct gaagttactc cagaatatgt actcacacct |
| 121 | gaagttttgg aattaggcac ctcagatgag agaggacatg tgacatttgt ctttatgggt |
| 181 | atgggtttcc ttactaaata tgtttttttc tagttccaac tatttaccca gctggaccct |
| 241 | aaggaggagg tggctctttt aaagacaggt tctcacatag tctaggctgg gtgcaagttc |
| 301 | tcgagtagct gaggctggcc ttgaacccac agagatcgac tgcctctgcc tccccagtgt |
| 361 | taggattaat ggcatgggct accacggtct gtcaaattgc ttctgtttta agacttatgt |
| 421 | tttaagtctt tgcagtgctt gcaaaggcca gaagaggatg ttagattctc ctaatcttaa |
| 481 | gagttacagg caatttcgag ctaccccaca atgttgctat aatagaatca gacctgtgga |
| 541 | agaaccttta ataccgaacc atctttgtgg tccagacctt gaactcctga tcctgcttct |
| 601 | tagtgctagg attgcaagtg tgtgtcactg tacctgattt ttgtgtggta ctggggggaa |
| 661 | aaccagggct ggctacactc tactaactca gcctgtcttt taacccttaa ttgtaaagtt |
| 721 | tgaagggtgc caggaagttc ttgggttgtg ataggatcct aagagtaaga acgcataccc |
| 781 | cgggaacaaa agcccgggca tcgatgaggt gcgcctagct gcagcaggcc ttactgcaca |
| 841 | tggagtgggt tgggtggttt gggtcaaggt tcacgtccat caattgtgaa acaggtggtt |
| 901 | ggtcagagtc cagtgcgaaa cattggactt ggctcatagc cagacccagg acaagttaga |
| 961 | agtcaggttc ttcaggtttt tcaattcttt ttttttcctt ctcttttcaa atggctcctg |
| 1021 | actggaatgt acaggtcaga ggacaacctg tgagagttct ctctatgagg acccagagga |
| 1081 | tagaacgcgg gttgtcaggc ttggtggcaa gtgccttcac ctgctgaggc actctgcagg |
| 1141 | tgacaagaac atttttacag tgtgcgaagc atagcattct agaatctctg gaagaaatga |
| 1201 | gaggccatcc agcctaagcc agctgtcctg agtgagtgag gtgaggaaga cagttggaga |
| 1261 | gtggagagac taggtagtgg gctgccttgg agttctgcta gcctgctgcc gtgagttggc |
| 1321 | aaccctgctc taggcaagct cttcattgac ttttcagatt ttgactcaag tggagcgtgt |
| 1381 | ggttgctcta tgaagatgga atttcaaagg ctggacagag gtcccagtgc ttaaggacat |
| 1441 | tggccgcatg tacaggacct gggtttgttt gtcagcactc acacggctgc tcagaacatt |
| 1501 | ctgtaacacc agttcctggg gatcagtgtc ctccgggccc tgtgggcacc aggcacatag |
| 1561 | aaggtgcaca gacatgcagg caggcgggcg ctcagccaca cgtacattta aaacaaaaaa |
| 1621 | tccaaaaaac ccaacaactt taaaatggga tttcagttgt gttgttcaca acgtgtggaa |
| 1681 | gagaaatgta ggattccttg ttatttgtga gaaactcaat cttttccctt agaagaaggc |
| 1741 | ttaggttgtg caggctctat tgaactaaca gaggatggaa aggattggtg gaaactgtac |
| 1801 | cagcaaggac tgtgcatcgt ggtttcgttt gtctttcttg tcattctcta aatacagtcg |
| 1861 | tgtgtgtaca ttctctaaat acagtcgcta cagtgtagcg tttacatttg actggatatt |
| 1921 | aaatactaaa catctttgaa catctttgaa ttttgcttct gatgggatct cggacaaatc |
| 1981 | ctctagttca cttgaaaata gtccccgtta cacggcacca tttgatagct gagtttatgt |
| 2041 | tgtttaatgc gggctttgtt tgtctctgca gtgctggaac ctgagcttag gactcaaagc |
| 2101 | cactaagcaa gcacacttga ccaccgagtg agccacccca gcctggcagc tgagtcttgt |
| 2161 | gtgctgtgtc tttctaaggg agagggtggt aaggaaaggc ttggtgaaca attcctgagt |
| 2221 | tttgacagtg tagcccaggc tagctcactg cctaagctgg gattacagct gtggaccacg |
| 2281 | aggcctgcca tatcacatgc cagatctgac agagacgtgg tgtttagaag tcaaagtgtt |
| 2341 | tataattatc tctgatgttt aaacattgat ttatttgtgt gtgtgtgtat gtgtgtgtgt |
| 2401 | gtggtgtgtg gggtgtgtgg gtgtgcatgt gtgtgtgtgt gtgtgtccca gcatacatgt |
| 2461 | agtgggcaga ggacagttta tagaagttga ttctcctttt gttgtatggt cctggggatt |
| 2521 | gaattcaagt cttcagactt gtagctaatg ccttctgagc cttctgaaaa gccctgcttt |
| 2581 | aacttaattt tggtagtttt ttcctgcagt tataaacact tagttgcttt tagagatgga |
| 2641 | gaaaatgaga gctgattggg gtgtcagtca gctctgttga tcccaagtgt gtgccaccgc |
| 2701 | gccttgcttc taagagtacg gctgctttgc gtgccattgt ccttcagtcc cttactgggg |
| 2761 | tagggagatg aggtgtgctc tacagccctg gctgagctca cacatggcat cccactgcct |
| 2821 | cagcctctga agggtgagtg cagccacaca ctgctcacta cactgcacca gctcagctgg |
| 2881 | cttcactcta tgcatttggt tttgtttatt tagcttttag ggtcaaggtc tcactcagta |
| 2941 | gctctggctg tcctggaatt cactgtgtag agcaggctgc ctgcttctgt ctcccgagag |
| 3001 | ctgggattac atgcatgtgg cactccacct gcctcaccgg tttgggtttg ataaagcgag |
| 3061 | ttgtgtttcg tcttcctctc tgtggcagtc tctccctggc ctggtagcac acagccactg |
| 3121 | agatttcctg tcacacagga tggccccttc cacactcagc ctggcctgtg tttgagtaga |
| 3181 | attagaagat tatattttat gttctcttta atttaaataa aatgaagatt gaatttaaca |
| 3241 | aaacaatatt tattaatctt tgcagaggtc ggaacagtag caaaggactg cctcagccta |
| 3301 | cgatttcttt tgacggaatc tatgcaaacg tgaggatggt tcatatactt acatcggttg |
| 3361 | tgggatcgaa atgtgaagta caagtgaaaa acggaggtgt atatgaagga gtttttaaaa |
| 3421 | catacagtcc taagtgtgat ttggtacttg atgctgcaca tgagaaaagt acagaatcca |
| 3481 | gttcggggcc aaaacgtgaa gaaataatgg agagtgtttt gttcaaatgc tcagacttcg |
| 3541 | ttgtggtaca atttaaagat acagactcga gttatgcacg aagagatgct ttcactgact |
| 3601 | ctgctctcag tgctaaagtg aatggtgaac acaaggagaa ggacctggag ccctgggatg |
| 3661 | caggggagct cacagccagc gaggagctgg aggctctgga gaatgatgtg tctaacggat |
| 3721 | gggatcccaa tgatatgttt cgatataatg aagagaatta cggtgtggtg tccacatacg |
| 3781 | atagtagttt atcttcatat acggttccct tagaaaggga caactcagaa gaatttctaa |
| 3841 | aacgggaggc aagggcaaac cagttagcag aagaaatcga gtccagtgct cagtacaaag |
| 3901 | ctcgtgtggc ccttgagaat gatgaccgga gtgaggaaga gaagtacaca gcagtccaga |
| 3961 | gaaactgcag tgaccgggaa ggtcatggca ccaacactag ggaaaataaa tatattcctc |
| 4021 | ctggacaaag aaacagagaa gtcatatcct ggggaagtgg gagacagagc tcaccacgga |
| 4081 | tgggccagcc tggaccaggc tccatgccat caagagctac ttctcacact tcagatttca |
| 4141 | acccgaatgc tggctcagac caaagagtag ttaatggagg tgttccctgg ccatcgcctt |
| 4201 | gcccatctcc ttcctctcgc ccaccttctc gctaccagtc aggtcccaac tctcttccac |
| 4261 | ctcgggcagc cacccctaca cggccgccct ccaggccccc ctcgaggccc tccagacccc |
| 4321 | cgtctcaccc ctctgctcat ggttctccag ctcctgtctc tactatgcct aaacgcatgt |
| 4381 | ctgcagaagg cccaccaagg atgtctccaa aggcacagcg gcaccctcgg aatcatagag |
| 4441 | tctccgctgg gagaggctcc atgtctagtg gcctagaatt tgtatcccac aatcccccaa |
| 4501 | gtgaagcagc tgctcctcca gtggcaagga ccagtcctgc agggggaacg tggtcctcag |
| 4561 | tggtcagtgg ggttccaaga ctatctccca aaactcacag acccaggtct cccaggcaga |
| 4621 | acagcgctgg aaactctccc agcgggcctg tgctcgcttc tccccaagct ggcatcaccc |
| 4681 | ctgccgaagc cgtttccatg ccggtccccg ccgcgtcccc tactcctgcc agccctgcgt |
| 4741 | ccaacagagc tctgacccca tctatcgagg cgaaagattc caggcttcaa gatcagaggc |
| 4801 | agaactctcc tgcagggaat aaagaaaata ttaaagcaag tgaaacatca cctagctttt |
| 4861 | caaaagctga aaacaaaggt gtgtcaccag ttatctctga acacagaaaa cagatcgatg |
| 4921 | atttaaagaa gtttaagaat gattttaggt tacagccaag ttctacgtct gaatctatgg |
| 4981 | atcaactact aagcaaaaac agagaaggag aaaagtcacg agatttgatg aaagacaaaa |
| 5041 | cggaagcaag tgctaaggac agcttcattg acagtggcag cagcagctgc accagcagca |
| 5101 | gcagcaagac caacagcccc agcgcctccc cttctgtgct tagtaatgca gagcacaaga |
| 5161 | gggggcctga ggtcacgtcc cagggggtgc agacttccag tccggcctgc aaacaagaga |
| 5221 | aggatgaccg agaagagcgg aaagacacaa ccgagcaagt taggaagtcg actttgaatc |
| 5281 | ccaatgcaaa ggagttcaac cctcgttctt tctctcagcc aaagccttct actaccccaa |
| 5341 | cgtcgcctcg gcctcaagcc cagcccagcc cgtccatggt gggtcatcag cagccagctc |
| 5401 | cagtgtacac gcagcctgtg tgctttgcac ccaatatgat gtaccctgtc ccagtgagcc |
| 5461 | caggcgtgca gcctttatac ccaataccta tgacgcccat gccagtgaac caagccaaga |
| 5521 | catatagagc agtaccaaat atgccccaac agcgacaaga gcagcaccat caaagcacca |
| 5581 | tgatgcaccc tgcctccgca gcagggccgc ctatcgttgc caccccgccc gccgcttact |
| 5641 | ccacgcagta cgttgcctac agccctcagc agtttcccaa ccagcctttg gtccagcacg |
| 5701 | tgccgcatta tcagtctcag catcctcatg tgtacagtcc tgtcatacaa ggtaatgcca |
| 5761 | ggatgatggc accaccagca catgctcagc ctggtttagt gtcgtcttca gctgctcagt |
| 5821 | tcggggctca cgagcagacg catgccatgt atgcatgtcc caaattacca tacaacaagg |
| 5881 | agacaagccc ttctttctac tttgccattt ccaccggctc cctcgctcag cagtacgcac |
| 5941 | atcctaatgc caccctgcat ccacaccctc cacatcctca gccttcggcc actcccaccg |
| 6001 | gacagcaaca aagccagcat ggtggaagtc atcctgcacc cagtcctgtt cagcaccatc |
| 6061 | agcaccaggc cgcccaggct cttcacctgg ccagtccaca gcagcagtcg gccatttatc |
| 6121 | acgcggggct ggcaccaaca ccaccttcca tgacacctgc ctctaataca cagtctccac |
| 6181 | agagcagttt cccagcagca ccacagacag tcttcaccat ccatccttct catgttcagc |
| 6241 | cggcatacac caccccaccc cacatggccc acgtacctca ggctcatgta cagtcaggaa |
| 6301 | tggttccttc tcatccaact gcccatgcgc caatgatgct tatgacgaca cagccacccg |
| 6361 | gcggtcccca ggccgccctc gctcaaagtg cactacagcc cattccagtc tcgacaacag |
| 6421 | cgcatttccc ctatatgacg cacccttcag tacaagccca ccaccaacag cagttgtaag |
| 6481 | tctgccctgg aggaaccgaa aggccaaatc ccctcctccc ttctactgct tctgccaact |
| 6541 | ggaagcacag aaaactagaa cttcatttat tttgtttttt tttttaaaaa agatacactg |
| 6601 | atttaacatc ggtaggaatg ctaacagttc acttgcagtg gaggatgttc tggaccgagt |
| 6661 | agaggcatgt agggacttgt ggctgttcca taactccatg tgctgttgca gggtcctcaa |
| 6721 | gtacccagct ctgcttgctg aaactggaag ttatttattt tttaatggcc cttgagagtc |
| 6781 | atgaacacat cagctagcaa cagaagtaac aagagtgatt cttgctgcta ttaccgcttt |
| 6841 | aaaaaaaaaa aaatcaagac ttggaacgcc cttttactaa acttgacaga agttcagtaa |
| 6901 | attcttaccg ccaaactgac ggattattat ttataaatca agtttgatga ggcgatcact |
| 6961 | gtctacagtg attcaacttt taagttaagg gaaaactttt actttgtaga taatataaaa |
| 7021 | taaaaactaa aaaaaaatta aaaaataaaa aaagttttaa aaactga |

SEQ ID NO: 8
Reverse complement of SEQ ID NO: 7
tcagtttttaaaactttttttattttttaatttttttttagtttttattttatattatctacaaagtaaa
agttttcccttaacttaaaagttgaatcactgtagacagtgatcgcctcatcaaacttgatttataaata
ataatccgtcagtttggcggtaagaatttactgaacttctgtcaagtttagtaaaagggcgttccaagtc
ttgatttttttttttttaaagcggtaatagcagcaagaatcactcttgttacttctgttgctagctgatg
tgttcatgactctcaagggccattaaaaaataaataacttccagtttcagcaagcagagctgggtacttg
aggaccctgcaacagcacatggagttatggaacagccacaagtccctacatgcctctactcggtccagaa
catcctccactgcaagtgaactgttagcattcctaccgatgttaaatcagtgtatcttttttaaaaaaaa
aaacaaaataaatgaagttctagttttctgtgcttccagttggcagaagcagtagaagggaggaggggat
ttggcctttcggttcctccagggcagacttacaactgctgttggtggtgggcttgtactgaagggtgcgt
catataggggaaatgcgctgttgtcgagactggaatgggctgtagtgcactttgagcgagggcggcctgg
ggaccgccgggtggctgtgtcgtcataagcatcattggcgcatgggcagttggatgagaaggaaccattc
ctgactgtacatgagcctgaggtacgtgggccatgtggggtggggtggtgtatgccggctgaacatgaga
aggatggatggtgaagactgtctgtggtgctgctgggaaactgctctgtggagactgtgtattagaggca
ggtgtcatggaaggtggtgttggtgccagccccgcgtgataaatggccgactgctgctgtggactggcca
ggtgaagagcctgggcggcctggtgctgatggtgctgaacaggactgggtgcaggatgacttccaccatg
ctggctttgttgctgtccggtgggagtggccgaaggctgaggatgtggagggtgtggatgcagggtggca
ttaggatgtgcgtactgctgagcgagggagccggtggaaatggcaaagtagaaagaagggcttgtctcct
tgttgtatggtaatttgggacatgcatacatggcatgcgtctgctcgtgagccccgaactgagcagctga
agacgacactaaaccaggctgagcatgtgctggtggtgccatcatcctggcattaccttgtatgacagga
ctgtacacatgaggatgctgagactgataatgcggcacgtgctggaccaaaggctggttgggaaactgct
gagggctgtaggcaacgtactgcgtggagtaagcggcgggcggggtggcaacgataggcggccctgctgc
ggaggcagggtgcatcatggtgctttgatggtgctgctcttgtcgctgttggggcatatttggtactgct
ctatatgtcttggcttggttcactggcatgggcgtcataggtattgggtataaaggctgcacgcctgggc
tcactgggacagggtacatcatattgggtgcaaagcacacaggctgcgtgtacactggagctggctgctg
atgacccaccatggacgggctgggctgggcttgaggccgaggcgacgttggggtagtagaaggctttggc
tgagagaaagaacgagggttgaactcctttgcattgggattcaaagtcgacttcctaacttgctcggttg
tgtctttccgctcttctcggtcatccttctcttgtttgcaggccggactggaagtctgcaccccctggga
cgtgacctcaggccccctcttgtgctctgcattactaagcacagaaggggaggcgctggggctgttggtc
ttgctgctgctgctggtgcagctgctgctgccactgtcaatgaagctgtccttagcacttgcttccgttt
tgtctttcatcaaatctcgtgacttttctccttctctgtttttgcttagtagttgatccatagattcaga
cgtagaacttggctgtaacctaaaatcattcttaaacttctttaaatcatcgatctgttttctgtgttca
gagataactggtgacacacctttgttttcagcttttgaaaagctaggtgatgtttcacttgctttaatat
tttctttattccctgcaggagagttctgcctctgatcttgaagcctggaatctttcgcctcgatagatgg
ggtcagagctctgttggacgcagggctggcaggagtaggggacgcggcggggaccggcatggaaacggct
tcggcaggggtgatgccagcttggggagaagcgagcacaggcccgctgggagagtttccagcgctgttct
gcctgggagacctgggtctgtgagttttgggagatagtcttggaaccccactgaccactgaggaccacgt
tccccctgcaggactggtccttgccactggaggagcagctgcttcacttgggggattgtgggatacaaat
tctaggccactagacatggagcctctcccagcggagactctatgattccgagggtgccgctgtgcctttg
gagacatccttggtgggccttctgcagacatgcgtttaggcatagtagagacaggagctggagaaccatg
agcagaggggtgagacgggggtctggagggcctcgaggggggcctggagggcggccgtgtaggggtggct
gcccgaggtggaagagagttgggacctgactggtagcgagaaggtgggcgagaggaaggagatgggcaag
gcgatggccagggaacacctccattaactactctttggtctgagccagcattcgggttgaaatctgaagt
gtgagaagtagctcttgatggcatggagcctggtccaggctggcccatccgtggtgagctctgtctccca
cttccccaggatatgacttctctgtttctttgtccaggaggaatatatttattttccctagtgttggtgc
catgaccttcccggtcactgcagtttctctggactgctgtgtacttctcttcctcactccggtcatcatt
ctcaagggccacacgagctttgtactgagcactggactcgatttcttctgctaactggtttgcccttgcc
tcccgttttagaaattcttctgagttgtccctttctaagggaaccgtatatgaagataaactactatcgt
atgtggacaccacaccgtaattctcttcattatatcgaaacatatcattgggatcccatccgttagacac
atcattctccagagcctccagctcctcgctggctgtgagctcccctgcatcccagggctccaggtccttc
tccttgtgttcaccattcactttagcactgagagcagagtcagtgaaagcatctcttcgtgcataactcg
agtctgtatctttaaattgtaccacaacgaagtctgagcatttgaacaaaacactctccattatttcttc
acgttttggccccgaactggattctgtacttttctcatgtgcagcatcaagtaccaaatcacacttagga
ctgtatgttttaaaaactccttcatatacacctccgtttttcacttgtacttcacatttcgatcccacaa
ccgatgtaagtatatgaaccatcctcacgtttgcatagattccgtcaaaagaaatcgtaggctgaggcag
tcctttgctactgttccgacctctgcaaagattaataaatattgttttgttaaattcaatcttcatttta
tttaaattaaagagaacataaaatataatcttctaattctactcaaacacaggccaggctgagtgtggaa
ggggccatcctgtgtgacaggaaatctcagtggctgtgtgctaccaggccagggagagactgccacagag
aggaagacgaaacacaactcgctttatcaaacccaaaccggtgaggcaggtggagtgccacatgcatgta
atcccagctctcgggagacagaagcaggcagcctgctctacacagtgaattccaggacagccagagctac
tgagtgagaccttgaccctaaaagctaaataaacaaaaccaaatgcatagagtgaagccagctgagctgg
tgcagtgtagtgagcagtgtgtggctgcactcacccttcagaggctgaggcagtgggatgccatgtgtga
gctcagccagggctgtagagcacacctcatctccctaccccagtaagggactgaaggacaatggcacgca
aagcagccgtactcttagaagcaaggcgcggtggcacacacttgggatcaacagagctgactgacacccc
aatcagctctcattttctccatctctaaaagcaactaagtgtttataactgcaggaaaaaactaccaaaa
ttaagttaaagcagggcttttcagaaggctcagaaggcattagctacaagtctgaagacttgaattcaat
ccccaggaccatacaacaaaaggagaatcaacttctataaactgtcctctgcccactacatgtatgctgg
gacacacacacacacacacatgcacacccacacaccccacacaccacacacacacacatacacacacaca
caaataaatcaatgtttaaacatcagagataattataaacactttgacttctaaacaccacgtctctgtc
agatctggcatgtgatatggcaggcctcgtggtccacagctgtaatcccagcttaggcagtgagctagcc
tgggctacactgtcaaaactcaggaattgttcaccaagcctttccttaccaccctctcccttagaaagac
acagcacacaagactcagctgccaggctggggtggctcactcggtggtcaagtgtgcttgcttagtggct
ttgagtcctaagctcaggttccagcactgcagagacaaacaaagcccgcattaaacaacataaactcagc
tatcaaatggtgccgtgtaacggggactattttcaagtgaactagaggatttgtccgagatcccatcaga
agcaaaattcaaagatgttcaaagatgtttagtatttaatatccagtcaaatgtaaacgctacactgtag
cgactgtatttagagaatgtacacacacgactgtatttagagaatgacaagaaagacaaacgaaaccacg
atgcacagtccttgctggtacagtttccaccaatcctttccatcctctgttagttcaatagagcctgcac
aacctaagccttcttctaagggaaaagattgagtttctcacaaataacaaggaatcctacatttctcttc
cacacgttgtgaacaacacaactgaaatcccattttaaagttgttgggttttttggattttttgttttaa
atgtacgtgtggctgagcgcccgcctgcctgcatgtctgtgcaccttctatgtgcctggtgcccacaggg
cccggaggacactgatccccaggaactggtgttacagaatgttctgagcagccgtgtgagtgctgacaaa
caaacccaggtcctgtacatgcggccaatgtccttaagcactgggacctctgtccagcctttgaaattcc
atcttcatagagcaaccacacgctccacttgagtcaaaatctgaaaagtcaatgaagagcttgcctagag
cagggttgccaactcacggcagcaggctagcagaactccaaggcagcccactacctagtctctccactct
ccaactgtcttcctcacctcactcactcaggacagctggcttaggctggatggcctctcatttcttccag
agattctagaatgctatgcttcgcacactgtaaaaatgttcttgtcacctgcagagtgcctcagcaggtg
aaggcacttgccaccaagcctgacaacccgcgttctatcctctgggtcctcatagagagaactctcacag
gttgtcctctgacctgtacattccagtcaggagccatttgaaaagagaaggaaaaaaaaagaattgaaaa
acctgaagaacctgacttctaacttgtcctgggtctggctatgagccaagtccaatgtttcgcactggac
tctgaccaaccacctgtttcacaattgatggacgtgaaccttgacccaaaccacccaacccactccatgt
gcagtaaggcctgctgcagctaggcgcacctcatcgatgcccgggcttttgttcccggggtatgcgttct
tactcttaggatcctatcacaacccaagaacttcctggcacccttcaaactttacaattaagggttaaaa
gacaggctgagttagtagagtgtagccagccctggttttccccccagtaccacacaaaaatcaggtacag
tgacacacacttgcaatcctagcactaagaagcaggatcaggagttcaaggtctggaccacaaagatggt
tcggtattaaaggttcttccacaggtctgattctattatagcaacattgtggggtagctcgaaattgcct
gtaactcttaagattaggagaatctaacatcctcttctggcctttgcaagcactgcaaagacttaaaaca
taagtcttaaaacagaagcaatttgacagaccgtggtagcccatgccattaatcctaacactggggaggc
agaggcagtcgatctctgtgggttcaaggccagcctcagctactcgagaacttgcacccagcctagacta
tgtgagaacctgtctttaaaagagccacctcctccttagggtccagctgggtaaatagttggaactagaa
aaaaacatatttagtaaggaaacccatacccataaagacaaatgtcacatgtcctctctcatctgaggtg
cctaattccaaaacttcaggtgtgagtacatattctggagtaacttcagaaaagagaaaagtaaaaagga
accattgaaaacaggtgtcgtggtacacacctttaatcccagcacttaaaatgcacaggccagcctg

### EQUIVALENTS

[0815] Those skilled in the art will recognize or be able to ascertain using no more than routine experimentation, many equivalents to the specific embodiments and methods described herein. Such equivalents are intended to be encompassed by the scope of the following claims.

1. A double stranded ribonucleic acid (dsRNA) agent for inhibiting expression of ATXN2, wherein the dsRNA agent comprises a sense strand and an antisense strand forming a double stranded region, wherein the sense strand comprises a nucleotide sequence comprising at least 15 contiguous nucleotides, with 0 or 1 mismatches, of a portion of the nucleotide sequence of SEQ ID NO: 1, or a nucleotide sequence having at least 90% nucleotide sequence identity to a portion of the nucleotide sequence of SEQ ID NO: 1, and the antisense strand comprises a nucleotide sequence comprising at least 15 contiguous nucleotides, with 0 or 1 mismatches, of the corresponding portion of the nucleotide sequence of SEQ ID NO: 2, or a nucleotide sequence having at least 90% nucleotide sequence identity to a portion of the nucleotide sequence of SEQ ID NO: 2.

2. A double stranded ribonucleic acid (RNAi) agent for inhibiting expression of an ATXN2 gene, wherein the RNAi agent comprises a sense strand and an antisense strand, and wherein the antisense strand comprises a region of complementarity comprising at least 15 contiguous nucleotides differing by no more than 3 nucleotides from an antisense sequence selected from the group consisting of the antisense sequences of Tables 2, 3, 5, 6, 9 and 10.

3. The dsRNA agent of claim 1, wherein the sense strand or the antisense strand is conjugated to one or more lipophilic moieties.

4. The dsRNA agent of claim 1, wherein the sense strand comprises a nucleotide sequence comprising at least 17 contiguous nucleotides, with 0 or 1 mismatches, of a portion of the nucleotide sequence of SEQ ID NO: 1, and the antisense strand comprises a nucleotide sequence comprising at least 17 contiguous nucleotides, with 0 or 1 mismatches, of the corresponding portion of the nucleotide sequence of SEQ ID NO: 2, such that the sense strand is complementary to the at least 17 contiguous nucleotides in the antisense strand.

5. The dsRNA agent of claim 1, wherein the sense strand comprises a nucleotide sequence comprising at least 19 contiguous nucleotides, with 0 or 1 mismatches, of a portion of the nucleotide sequence of SEQ ID NO: 1, and the antisense strand comprises a nucleotide sequence comprising at least 19 contiguous nucleotides, with 0 or 1 mismatches, of the corresponding portion of the nucleotide sequence of SEQ ID NO: 2, such that the sense strand is complementary to the at least 19 contiguous nucleotides in the antisense strand.

6. The dsRNA agent of claim 1, wherein the sense strand comprises a nucleotide sequence comprising at least 21 contiguous nucleotides, with 0 or 1 mismatches, of a portion of the nucleotide sequence of SEQ ID NO: 1, and the antisense strand comprises a nucleotide sequence comprising at least 21 contiguous nucleotides, with 0 or 1 mismatches, of the corresponding portion of nucleotide sequence of SEQ ID NO: 2, such that the sense strand is complementary to the at least 21 contiguous nucleotides in the antisense strand.

7. The dsRNA agent of claim 1, wherein the sense strand or the antisense strand is a sense strand or an antisense strand selected from the group consisting of any of the sense strands and antisense strands in any one of Tables 2, 3, 5, 6, 9 or 10.

8. The dsRNA agent of claim 1, wherein both the sense strand and the antisense strand is conjugated to one or more lipophilic moieties.

9. The dsRNA agent of claim 3, wherein:
the lipophilic moiety is conjugated to one or more positions in the double stranded region of the dsRNA agent, optionally wherein the lipophilic moiety is conjugated via a linker or a carrier and/or optionally wherein lipophilicity of the lipophilic moiety, measured by logKow, exceeds 0:
one or more lipophilic moieties are conjugated to one or more internal positions on at least one strand: optionally wherein the one or more lipophilic moieties are conjugated to one or more internal positions on at least one strand via a linker or carrier, optionally wherein: the internal positions include all positions except the terminal two positions from each end of the at least one strand: the internal positions include all positions except the terminal three positions from each end of the at least one strand: the internal positions exclude a cleavage site region of the sense strand, optionally wherein the internal positions include all positions except positions 9-12, counting from the 5′-end of the sense strand and/or the internal positions include all positions except positions 11-13, counting from the 3′-end of the sense strand: the internal positions exclude a cleavage site region of the antisense strand, optionally wherein the internal positions include all positions except positions 12-14, counting from the 5′-end of the antisense strand; and/or the internal positions include all positions except positions 11-13 on the sense strand, counting from the 3′-end, and positions 12-14 on the antisense strand, counting from the 5′-end; and/or
the positions in the double stranded region exclude a cleavage site region of the sense strand.

10-11. (canceled)

12. The dsRNA agent of claim 1, wherein the hydrophobicity of the double-stranded RNAi agent, measured by the unbound fraction in a plasma protein binding assay of the double-stranded RNAi agent, exceeds 0.2, optionally wherein the plasma protein binding assay is an electrophoretic mobility shift assay using human serum albumin protein.

13. (canceled)

14. The dsRNA agent of claim 1, wherein:
the dsRNA agent comprises at least one modified nucleotide, optionally wherein:
no more than five of the sense strand nucleotides and no more than five of the nucleotides of the antisense strand are unmodified nucleotides;
all of the nucleotides of the sense strand and all of the nucleotides of the antisense strand comprise a modification; and/or
at least one of the modified nucleotides is selected from the group a deoxy-nucleotide, a 3′-terminal deoxy-thymine (dT) nucleotide, a 2′-O-methyl modified nucleotide, a 2′-fluoro modified nucleotide, a 2′-deoxy-modified nucleotide, a locked nucleotide, an unlocked nucleotide, a conformationally restricted nucleotide, a constrained ethyl nucleotide, an abasic nucleotide, a 2′-amino-modified nucleotide, a 2′-O-allyl-modified nucleotide, 2′-C-alkyl-modified nucleotide, 2′-hydroxly-modified nucleotide, a 2′-methoxyethyl modified nucleotide, a 2′-O-alkyl-modified nucleotide, a morpholino nucleotide, a phosphoramidate, a non-natural base comprising nucleotide, a tetrahydropyran modified nucleotide, a 1,5-anhydrohexitol modified nucleotide, a cyclohexenyl modified nucleotide, a nucleotide comprising a 5′-phosphorothioate group, a nucleotide comprising a 5′-methylphosphonate group, a nucleotide comprising a 5′ phosphate or 5′ phosphate mimic, a nucleotide comprising vinyl phosphonate, a nucleotide comprising adenosine-glycol nucleic acid (GNA), a nucleotide comprising thymidine-glycol nucleic acid (GNA)S-Isomer, a nucleotide comprising 2-hydroxymethyl-tetrahydrofurane-5-phosphate, a nucleotide comprising 2′-deoxythymidine-3′phosphate, a nucleotide comprising 2′-deoxyguanosine-3′-phosphate, and a terminal nucleotide linked to a cholestervl derivative and a dodecanoic acid bisdecylamide group; and combinations thereof, optionally wherein the modified nucleotide is selected from the group consisting of a 2′-deoxy-2′-fluoro modified nucleotide, a 2′-deoxy-modified nucleotide, 3′-terminal deoxy-thymine nucleotides (dT), a locked nucleotide, an abasic nucleotide, a 2′-amino-modified nucleotide, a 2′-alkyl-modified nucleotide, a morpholino nucleotide, a phosphoramidate, and a non-natural base comprising nucleotide; optionally wherein the modified nucleotide comprises a short sequence of 3′-terminal deoxy-thymine nucleotides (dT): optionally wherein the modifications on the nucleotides are 2′-O-methyl, GNA and 2′fluoro modifications; and/or optionally further comprising at least one phosphorothioate internucleotide linkage, optionally wherein the dsRNA agent comprises 6-8 phosphorothioate internucleotide linkages:
each strand is no more than 30 nucleotides in length:
at least one strand comprises a 3′ overhang of at least 1 nucleotide;
at least one strand comprises a 3′ overhang of at least 2 nucleotides;
the double stranded region is 15-30 nucleotide pairs in length, optionally wherein the double stranded region is 17-23 nucleotide pairs in length: optionally wherein the double stranded region is 17-25 nucleotide pairs in length: optionally wherein the double stranded region is 23-27 nucleotide pairs in length: optionally wherein the double stranded region is 19-21 nucleotide pairs in length; and/or optionally wherein the double stranded region is 21-23 nucleotide pairs in length;
each strand has 19-30 nucleotides;
each strand has 19-23 nucleotides;
each strand has 21-23 nucleotides;
the sense strand or the antisense strand is conjugated to one or more lipophilic moieties and the one or more lipophilic moieties are conjugated to one or more of the internal positions selected from the group consisting of positions 4-8 and 13-18 on the sense strand, and positions 6-10 and 15-18 on the antisense strand, counting from the 5′end of each strand, optionally wherein the one or more lipophilic moieties are conjugated to one or more of the internal positions selected from the group consisting of positions 5, 6, 7, 15, and 17 on the sense strand, and positions 15 and 17 on the antisense strand, counting from the 5′-end of each strand;
the sense strand or the antisense strand is conjugated to one or more lipophilic moieties and the sense strand is 21 nucleotides in length, the antisense strand is 23 nucleotides in length, and the lipophilic moiety is conjugated to position 21, position 20, position 15, position 1, position 7, position 6, or position 2 of the sense strand or position 16 of the antisense strand, optionally wherein: the lipophilic moiety is conjugated to position 21, position 20, position 15, position 1, or position 7 of the sense strand; the lipophilic moiety is conjugated to position 21, position 20, or position 15 of the sense strand; the lipophilic moiety is conjugated to position 20 or position 15 of the sense strand; and/or the lipophilic moiety is conjugated to position 16 of the antisense strand;
the sense strand or the antisense strand is conjugated to one or more lipophilic moieties and the lipophilic moiety is an aliphatic, alicyclic, or polyalicyclic compound, optionally wherein the lipophilic moiety is selected from the group consisting of lipid, cholesterol, retinoic acid, cholic acid, adamantane acetic acid, 1-pyrene butyric acid, dihydrotestosterone, 1,3-bis-O(hexadecyl)glycerol, geranyloxyhexyanol, hexadecylglycerol, borneol, menthol, 1,3-propanediol, heptadecyl group, palmitic acid, myristic acid, 03-(oleoyl)lithocholic acid, 03-(oleoyl)cholenic acid, dimethoxytrityl, or phenoxazine, optionally wherein the lipophilic moiety contains a saturated or unsaturated C₄-C₃₀ hydrocarbon chain, and an optional functional group selected from the group consisting of hydroxyl, amine, carboxylic acid, sulfonate, phosphate, thiol, azide, and alkyne, optionally wherein: the lipophilic moiety contains a saturated or unsaturated C₆-C₁₈ hydrocarbon chain; and/or the lipophilic moiety contains a saturated or unsaturated C₁₆ hydrocarbon chain, optionally wherein the saturated or unsaturated C₁₆ hydrocarbon chain is conjugated to position 6, counting from the 5′-end of the strand;
the sense strand or the antisense strand is conjugated to one or more lipophilic moieties and the lipophilic moiety is conjugated via a carrier that replaces one or more nucleotide(s) in the internal position(s) or the double stranded region, optionally wherein the carrier is a cyclic group selected from the group consisting of pyrrolidinyl, pyrazolinyl, pyrazolidinyl, imidazolinyl, imidazolidinyl, piperidinyl, piperazinyl, [1,3]dioxolanyl, oxazolidinyl, isoxazolidinyl, morpholinyl, thiazolidinyl, isothiazolidinyl, quinoxalinyl, pyridazinonyl, tetrahydrofuranyl, and decalinyl; or is an acyclic moiety based on a serinol backbone or a diethanolamine backbone;
the sense strand or the antisense strand is conjugated to one or more lipophilic moieties and the lipophilic moiety is conjugated to the double-stranded iRNA agent via a linker containing an ether, thioether, urea, carbonate, amine, amide, maleimide-thioether, disulfide, phosphodiester, sulfonamide linkage, a product of a click reaction, or carbamate;
the sense strand or the antisense strand is conjugated to one or more lipophilic moieties and the lipophilic moiety is conjugated to a nucleobase, sugar moiety, or internucleosidic linkage:
the sense strand or the antisense strand is conjugated to one or more lipophilic moieties and the lipophilic moiety or targeting ligand is conjugated via a bio-cleavable linker selected from the group consisting of DNA, RNA, disulfide, amide, functionalized monosaccharides or oligosaccharides of galactosamine, glucosamine, glucose, galactose, mannose, and combinations thereof;
the 3′ end of the sense strand is protected via an end cap which is a cyclic group having an amine, said cyclic group being selected from the group consisting of pyrrolidinyl, pyrazolinyl, pyrazolidinyl, imidazolinyl, imidazolidinyl, piperidinyl, piperazinyl, [1,3]dioxolanyl, oxazolidinyl, isoxazolidinyl, morpholinyl, thiazolidinyl, isothiazolidinyl, quinoxalinyl, pyridazinonyl, tetrahydrofuranyl, and decalinyl;
the dsRNA agent further comprises a targeting ligand that targets a liver tissue, optionally wherein the targeting ligand is a GalNAc conjugate:
the dsRNA agent further comprises:
a terminal, chiral modification occurring at the first internucleotide linkage at the 3′ end of the antisense strand, having the linkage phosphorus atom in Sp configuration,
a terminal, chiral modification occurring at the first internucleotide linkage at the 5′ end of the antisense strand, having the linkage phosphorus atom in Rp configuration, or
a terminal, chiral modification occurring at the first internucleotide linkage at the 5′ end of the sense strand, having the linkage phosphorus atom in either Rp configuration or Sp configuration;
the dsRNA agent further comprises:
a terminal, chiral modification occurring at the first and second internucleotide linkages at the 3′ end of the antisense strand, having the linkage phosphorus atom in Sp configuration,
a terminal, chiral modification occurring at the first internucleotide linkage at the 5′ end of the antisense strand, having the linkage phosphorus atom in Rp configuration, or
a terminal, chiral modification occurring at the first internucleotide linkage at the 5′ end of the sense strand, having the linkage phosphorus atom in either Rp or Sp configuration;
the dsRNA agent further comprises:
a terminal, chiral modification occurring at the first, second and third internucleotide linkages at the 3′ end of the antisense strand, having the linkage phosphorus atom in Sp configuration,
a terminal, chiral modification occurring at the first internucleotide linkage at the 5′ end of the antisense strand, having the linkage phosphorus atom in Rp configuration, or
a terminal, chiral modification occurring at the first internucleotide linkage at the 5′ end of the sense strand, having the linkage phosphorus atom in either Rp or Sp configuration;
the dsRNA agent further comprises:
a terminal, chiral modification occurring at the first, and second internucleotide linkages at the 3′ end of the antisense strand, having the linkage phosphorus atom in Sp configuration,
a terminal, chiral modification occurring at the third internucleotide linkages at the 3′ end of the antisense strand, having the linkage phosphorus atom in Rp configuration,
a terminal, chiral modification occurring at the first internucleotide linkage at the 5′ end of the antisense strand, having the linkage phosphorus atom in Rp configuration, or
a terminal, chiral modification occurring at the first internucleotide linkage at the 5′ end of the sense strand, having the linkage phosphorus atom in either Rp or Sp configuration;
the dsRNA agent further comprises:
a terminal, chiral modification occurring at the first, and second internucleotide linkages at the 3′ end of the antisense strand, having the linkage phosphorus atom in Sp configuration,
a terminal, chiral modification occurring at the first, and second internucleotide linkages at the 5′ end of the antisense strand, having the linkage phosphorus atom in Rp configuration, or
a terminal, chiral modification occurring at the first internucleotide linkage at the 5′ end of the sense strand, having the linkage phosphorus atom in either Rp or Sp configuration;
the dsRNA agent further comprises a phosphate or phosphate mimic at the 5′-end of the antisense strand, optionally wherein the phosphate mimic is a 5′-vinyl phosphonate (VP);
the base pair at the 1 position of the 5′-end of the antisense strand of the duplex is an A:U base pair; and/or
the sense strand has a total of 21 nucleotides and the antisense strand has a total of 23 nucleotides.

15-75. (canceled)

76. A composition comprising one or more of the following:
A cell containing the dsRNA agent of claim 1;
A pharmaceutical composition for inhibiting expression of a gene encoding ATXN2, comprising the dsRNA agent of claim 1; and/or
A pharmaceutical composition comprising the dsRNA agent of claim 1 and a lipid formulation.

77-78. (canceled)

79. A method of inhibiting expression of an ATXN2 gene in a cell, the method comprising:
(a) contacting the cell with the dsRNA agent of claim 1; and
(b) maintaining the cell produced in step (a) for a time sufficient to obtain degradation of the mRNA transcript of the ATXN2 gene, thereby inhibiting expression of the ATXN2 gene in the cell.

80. The method of claim 79, wherein:
the cell is within a subject, optionally wherein the subject is a human:
the expression of ATXN2 is inhibited by at least 50%;
the subject meets at least one diagnostic criterion for an ATXN2-associated disease:
the subject has been diagnosed with an ATXN2-associated disease; and/or
the ATXN2-associated disease is selected from the group consisting of a spinocerebellar ataxia (SCA), such as spinocerebellar ataxia 2 (SCA2), or Amyotrophic Lateral Sclerosis (ALS).

81-85. (canceled)

86. A method of treating a subject diagnosed with an ATXN2-associated neurodegenerative disease, the method comprising administering to the subject a therapeutically effective amount of the dsRNA agent of claim 1, thereby treating the subject.

87. The method of claim 86, wherein:
treating comprises amelioration of at least on sign or symptom of the disease;
treating comprises prevention of progression of the disease;
the ATXN2-associated disease is characterized by progressive cerebellar ataxia or blindness;
the ATXN2-associated neurodegenerative disease is selected from the group consisting of a spinocerebellar ataxia (SCA), such as spinocerebellar ataxia 2 (SCA2), and Amyotrophic Lateral Sclerosis ALS);
the subject is human:
the dsRNA agent is administered to the subject at a dose of about 0.01 mg/kg to about 50 mg/kg:
the dsRNA agent is administered to the subject intrathecally; and/or
the method further comprises administering to the subject an additional agent or a therapy suitable for treatment or prevention of an ATXN2-associated disease or disorder.

88-90. (canceled)

91. A method of preventing development of an ATXN2-associated neurodegenerative disease in a subject meeting at least one diagnostic criterion for an ATXN2-associated neurodegenerative disease, the method comprising administering to the subject a therapeutically effective amount of the dsRNA agent of claim 1, thereby preventing the development of an ATXN2-associated neurodegenerative disease in the subject meeting at least one diagnostic criterion for an ATXN2-associated neurodegenerative disease.

92. (canceled)

93. The method of claim 91, wherein:
the subject has been diagnosed with an ATXN2-associated disease, optionally wherein the ATXN2-associated disease is selected from the group consisting of a spinocerebellar ataxia (SCA), such as spinocerebellar ataxia 2 (SCA2), and Amyotrophic Lateral Sclerosis (ALS).

94-97. (canceled)

The application's sequence listing, which the Patent Office published only in electronic form, follows.

SEQUENCE LISTING (6323 sequences)

SEQ ID NO: 1 - DNA, 4712 bp, Homo sapiens
acccccgagaaagcaacccagcgcgccgcccgctcctcacgtgtccctcccggccccggggccacctcacgttctgcttccgtctgacccctccgacttccggtaaagagtccctatccgcacctccgctcccacccggcgcctcggcgcgcccgccctccgatgcgctcagcggccgcagctcctcggagtcccgcggtggccaccgagtctcgccgcttcgccgcagccaggtggcccgggtggcgctcgctccagcggccggcgcggcggagcgggcggggcggcggtggcgcggccccgggaccgtatccctccgccgcccctcccccgcccggccccggcccccctccctcccggcagagctcgcctccctccgcctcagactgttttggtagcaacggcaacggcggcggcgcgtttcggcccggctcccggcggctccttggtctcggcgggcctccccgccccttcgtcgtcctccttctccccctcgccagcccgggcgcccctccggccgcgccaacccgcgcctccccgctcggcgcccgcgcgtccccgccgcgttccggcgtctccttggcgcgcccggctcccggctgtccccgcccggcgtgcgagccggtgtatgggcccctcaccatgtcgctgaagccccagcagcagcagcagcagcagcagcagcagcagcagcagcaacagcagcagcagcagcagcagcagcagccgccgcccgcggctgccaatgtccgcaagcccggcggcagcggccttctagcgtcgcccgccgccgcgccttcgccgtcctcgtcctcggtctcctcgtcctcggccacggctccctcctcggtggtcgcggcgacctccggcggcgggaggcccggcctgggcagaggtcgaaacagtaacaaaggactgcctcagtctacgatttcttttgatggaatctatgcaaatatgaggatggttcatatacttacatcagttgttggctccaaatgtgaagtacaagtgaaaaatggaggtatatatgaaggagtttttaaaacttacagtccgaagtgtgatttggtacttgatgccgcacatgagaaaagtacagaatccagttcggggccgaaacgtgaagaaataatggagagtattttgttcaaatgttcagactttgttgtggtacagtttaaagatatggactccagttatgcaaaaagagatgcttttactgactctgctatcagtgctaaagtgaatggcgaacacaaagagaaggacctggagccctgggatgcaggtgaactcacagccaatgaggaacttgaggctttggaaaatgacgtatctaatggatgggatcccaatgatatgtttcgatataatgaagaaaattatggtgtagtgtctacgtatgatagcagtttatcttcgtatacagtgcccttagaaagagataactcagaagaatttttaaaacgggaagcaagggcaaaccagttagcagaagaaattgagtcaagtgcccagtacaaagctcgagtggccctggaaaatgatgataggagtgaggaagaaaaatacacagcagttcagagaaattccagtgaacgtgaggggcacagcataaacactagggaaaataaatatattcctcctggacaaagaaatagagaagtcatatcctggggaagtgggagacagaattcaccgcgtatgggccagcctggatcgggctccatgccatcaagatccacttctcacacttcagatttcaacccgaattctggttcagaccaaagagtagttaatggaggtgttccctggccatcgccttgcccatctccttcctctcgcccaccttctcgctaccagtcaggtcccaactctcttccacctcgggcagccacccctacacggccgccctccaggcccccctcgcggccatccagacccccgtctcacccctctgctcatggttctccagctcctgtctctactatgcctaaacgcatgtcttcagaagggcctccaaggatgtccccaaaggcccagcgacatcctcgaaatcacagagtttctgctgggaggggttccatatccagtggcctagaatttgtatcccacaacccacccagtgaagcagctactcctccagtagcaaggaccagtccctcggggggaacgtggtcatcagtggtcagtggggttccaagattatcccctaaaactcatagacccaggtctcccagacagaacagtattggaaatacccccagtgggccagttcttgcttctccccaagctggtattattccaactgaagctgttgccatgcctattccagctgcatctcctacgcctgctagtcctgcatcgaacagagctgttaccccttctagtgaggctaaagattccaggcttcaagatcagaggcagaactctcctgcagggaataaagaaaatattaaacccaatgaaacatcacctagcttctcaaaagctgaaaacaaaggtatatcaccagttgtttctgaacatagaaaacagattgatgatttaaagaaatttaagaatgattttaggttacagccaagttctacttctgaatctatggatcaactactaaacaaaaatagagagggagaaaaatcaagagatttgatcaaagacaaaattgaaccaagtgctaaggattctttcattgaaaatagcagcagcaactgtaccagtggcagcagcaagccgaatagccccagcatttccccttcaatacttagtaacacggagcacaagaggggacctgaggtcacttcccaaggggttcagacttccagcccagcatgtaaacaagagaaagacgataaggaagagaagaaagacgcagctgagcaagttaggaaatcaacattgaatcccaatgcaaaggagttcaacccacgttccttctctcagccaaagccttctactaccccaacttcacctcggcctcaagcacaacctagcccatctatggtgggtcatcaacagccaactccagtttatactcagcctgtttgttttgcaccaaatatgatgtatccagtcccagtgagcccaggcgtgcaacctttatacccaatacctatgacgcccatgccagtgaatcaagccaagacatatagagcagtaccaaatatgccccaacagcggcaagaccagcatcatcagagtgccatgatgcacccagcgtcagcagcgggcccaccgattgcagccaccccaccagcttactccacgcaatatgttgcctacagtcctcagcagttcccaaatcagccccttgttcagcatgtgccacattatcagtctcagcatcctcatgtctatagtcctgtaatacagggtaatgctagaatgatggcaccaccaacacacgcccagcctggtttagtatcttcttcagcaactcagtacggggctcatgagcagacgcatgcgatgtatgcatgtcccaaattaccatacaacaaggagacaagcccttctttctactttgccatttccacgggctcccttgctcagcagtatgcgcaccctaacgctaccctgcacccacatactccacaccctcagccttcagctacccccactggacagcagcaaagccaacatggtggaagtcatcctgcacccagtcctgttcagcaccatcagcaccaggccgcccaggctctccatctggccagtccacagcagcagtcagccatttaccacgcggggcttgcgccaactccaccctccatgacacctgcctccaacacgcagtcgccacagaatagtttcccagcagcacaacagactgtctttacgatccatccttctcacgttcagccggcgtataccaacccaccccacatggcccacgtacctcaggctcatgtacagtcaggaatggttccttctcatccaactgcccatgcgccaatgatgctaatgacgacacagccacccggcggtccccaggccgccctcgctcaaagtgcactacagcccattccagtctcgacaacagcgcatttcccctatatgacgcacccttcagtacaagcccaccaccaacagcagttgtaaggctgccctggaggaaccgaaaggccaaattccctcctcccttctactgcttctaccaactggaagcacagaaaactagaatttcatttattttgtttttaaaatatatatgttgatttcttgtaacatccaataggaatgctaacagttcacttgcagtggaagatacttggaccgagtagaggcatttaggaacttgggggctattccataattccatatgctgtttcagagtcccgcaggtaccccagctctgcttgccgaaactggaagttatttattttttaataacccttgaaagtcatgaacacatcagctagcaaaagaagtaacaagagtgattcttgctgctattactgctaaaaaaaaaaaaaaaaaaaaatcaagacttggaacgcccttttactaaacttgacaaagtttcagtaaattcttaccgtcaaactgacggattattatttataaatcaagtttgatgaggtgatcactgtctacagtggttcaacttttaagttaagggaaaaacttttactttgtagataatataaaataaaaacttaaaaaaaatttaaaaaataaaaaaagttttaaaaactgaaaaaaaaaaa

SEQ ID NO: 2 - DNA, 4712 bp, Homo sapiens
tttttttttttcagtttttaaaactttttttattttttaaattttttttaagtttttattttatattatctacaaagtaaaagtttttcccttaacttaaaagttgaaccactgtagacagtgatcacctcatcaaacttgatttataaataataatccgtcagtttgacggtaagaatttactgaaactttgtcaagtttagtaaaagggcgttccaagtcttgatttttttttttttttttttttagcagtaatagcagcaagaatcactcttgttacttcttttgctagctgatgtgttcatgactttcaagggttattaaaaaataaataacttccagtttcggcaagcagagctggggtacctgcgggactctgaaacagcatatggaattatggaatagcccccaagttcctaaatgcctctactcggtccaagtatcttccactgcaagtgaactgttagcattcctattggatgttacaagaaatcaacatatatattttaaaaacaaaataaatgaaattctagttttctgtgcttccagttggtagaagcagtagaagggaggagggaatttggcctttcggttcctccagggcagccttacaactgctgttggtggtgggcttgtactgaagggtgcgtcatataggggaaatgcgctgttgtcgagactggaatgggctgtagtgcactttgagcgagggcggcctggggaccgccgggtggctgtgtcgtcattagcatcattggcgcatgggcagttggatgagaaggaaccattcctgactgtacatgagcctgaggtacgtgggccatgtggggtgggttggtatacgccggctgaacgtgagaaggatggatcgtaaagacagtctgttgtgctgctgggaaactattctgtggcgactgcgtgttggaggcaggtgtcatggagggtggagttggcgcaagccccgcgtggtaaatggctgactgctgctgtggactggccagatggagagcctgggcggcctggtgctgatggtgctgaacaggactgggtgcaggatgacttccaccatgttggctttgctgctgtccagtgggggtagctgaaggctgagggtgtggagtatgtgggtgcagggtagcgttagggtgcgcatactgctgagcaagggagcccgtggaaatggcaaagtagaaagaagggcttgtctccttgttgtatggtaatttgggacatgcatacatcgcatgcgtctgctcatgagccccgtactgagttgctgaagaagatactaaaccaggctgggcgtgtgttggtggtgccatcattctagcattaccctgtattacaggactatagacatgaggatgctgagactgataatgtggcacatgctgaacaaggggctgatttgggaactgctgaggactgtaggcaacatattgcgtggagtaagctggtggggtggctgcaatcggtgggcccgctgctgacgctgggtgcatcatggcactctgatgatgctggtcttgccgctgttggggcatatttggtactgctctatatgtcttggcttgattcactggcatgggcgtcataggtattgggtataaaggttgcacgcctgggctcactgggactggatacatcatatttggtgcaaaacaaacaggctgagtataaactggagttggctgttgatgacccaccatagatgggctaggttgtgcttgaggccgaggtgaagttggggtagtagaaggctttggctgagagaaggaacgtgggttgaactcctttgcattgggattcaatgttgatttcctaacttgctcagctgcgtctttcttctcttccttatcgtctttctcttgtttacatgctgggctggaagtctgaaccccttgggaagtgacctcaggtcccctcttgtgctccgtgttactaagtattgaaggggaaatgctggggctattcggcttgctgctgccactggtacagttgctgctgctattttcaatgaaagaatccttagcacttggttcaattttgtctttgatcaaatctcttgatttttctccctctctatttttgtttagtagttgatccatagattcagaagtagaacttggctgtaacctaaaatcattcttaaatttctttaaatcatcaatctgttttctatgttcagaaacaactggtgatatacctttgttttcagcttttgagaagctaggtgatgtttcattgggtttaatattttctttattccctgcaggagagttctgcctctgatcttgaagcctggaatctttagcctcactagaaggggtaacagctctgttcgatgcaggactagcaggcgtaggagatgcagctggaataggcatggcaacagcttcagttggaataataccagcttggggagaagcaagaactggcccactgggggtatttccaatactgttctgtctgggagacctgggtctatgagttttaggggataatcttggaaccccactgaccactgatgaccacgttccccccgagggactggtccttgctactggaggagtagctgcttcactgggtgggttgtgggatacaaattctaggccactggatatggaacccctcccagcagaaactctgtgatttcgaggatgtcgctgggcctttggggacatccttggaggcccttctgaagacatgcgtttaggcatagtagagacaggagctggagaaccatgagcagaggggtgagacgggggtctggatggccgcgaggggggcctggagggcggccgtgtaggggtggctgcccgaggtggaagagagttgggacctgactggtagcgagaaggtgggcgagaggaaggagatgggcaaggcgatggccagggaacacctccattaactactctttggtctgaaccagaattcgggttgaaatctgaagtgtgagaagtggatcttgatggcatggagcccgatccaggctggcccatacgcggtgaattctgtctcccacttccccaggatatgacttctctatttctttgtccaggaggaatatatttattttccctagtgtttatgctgtgcccctcacgttcactggaatttctctgaactgctgtgtatttttcttcctcactcctatcatcattttccagggccactcgagctttgtactgggcacttgactcaatttcttctgctaactggtttgcccttgcttcccgttttaaaaattcttctgagttatctctttctaagggcactgtatacgaagataaactgctatcatacgtagacactacaccataattttcttcattatatcgaaacatatcattgggatcccatccattagatacgtcattttccaaagcctcaagttcctcattggctgtgagttcacctgcatcccagggctccaggtccttctctttgtgttcgccattcactttagcactgatagcagagtcagtaaaagcatctctttttgcataactggagtccatatctttaaactgtaccacaacaaagtctgaacatttgaacaaaatactctccattatttcttcacgtttcggccccgaactggattctgtacttttctcatgtgcggcatcaagtaccaaatcacacttcggactgtaagttttaaaaactccttcatatatacctccatttttcacttgtacttcacatttggagccaacaactgatgtaagtatatgaaccatcctcatatttgcatagattccatcaaaagaaatcgtagactgaggcagtcctttgttactgtttcgacctctgcccaggccgggcctcccgccgccggaggtcgccgcgaccaccgaggagggagccgtggccgaggacgaggagaccgaggacgaggacggcgaaggcgcggcggcgggcgacgctagaaggccgctgccgccgggcttgcggacattggcagccgcgggcggcggctgctgctgctgctgctgctgctgctgttgctgctgctgctgctgctgctgctgctgctgctgctgctggggcttcagcgacatggtgaggggcccatacaccggctcgcacgccgggcggggacagccgggagccgggcgcgccaaggagacgccggaacgcggcggggacgcgcgggcgccgagcggggaggcgcgggttggcgcggccggaggggcgcccgggctggcgagggggagaaggaggacgacgaaggggcggggaggcccgccgagaccaaggagccgccgggagccgggccgaaacgcgccgccgccgttgccgttgctaccaaaacagtctgaggcggagggaggcgagctctgccgggagggaggggggccggggccgggcgggggaggggcggcggagggatacggtcccggggccgcgccaccgccgccccgcccgctccgccgcgccggccgctggagcgagcgccacccgggccacctggctgcggcgaagcggcgagactcggtggccaccgcgggactccgaggagctgcggccgctgagcgcatcggagggcgggcgcgccgaggcgccgggtgggagcggaggtgcggatagggactctttaccggaagtcggaggggtcagacggaagcagaacgtgaggtggccccggggccgggagggacacgtgaggagcgggcggcgcgctgggttgctttctcgggggt

SEQ ID NO: 3 - DNA, 4666 bp, Macaca fascicularis
cgcgaaagcggcccagcgcggcgccctcacgtgtccctcccggccccggggccactcacgttctgcttccgcccgacccctccgacttccggtaaagagtccctaccgcacctccgcgctcccccggcgcctcggcgcgcccggcctccgatgcgctcagtggccgcagctcctcggagtcccgtggcgggcaccaagtctcgccccttcgccgcagccaactggcccgggtggcgctcgctccagcggccggcgcagcggaacgggcggggcggcggtggcgcggcctctggacagtatccctccgccgcccctcccccgcccggccctggcccccctccctcccggcagcgctcgcctccctccgcctcagactgttttggttgcaacggcaacggcggtggcgcgttccggcccggctccccgcagctcctcggtctcggcgggcctccccgccccttcgtcgtcctccttctcccccgcggcagcccgggtgcccccccggccgcgccaacccgcgcctccctgctcggcgcccgcgcgtccccgccgcgctccggcgtctcctcggcgcgcccggctcccggctgtccccgcccggcgtgcgagccggtgtatgggcccctcaccatgtcgctgaagccccagcagcagcagcagcagcagcaacagcagcagcagcagcagcagcagccgcccgcggctgccaatgtccgcaagcccggcggcagcggccttctagcgtcgcccgccgcctcgccttcgccgtcgtcgtcctcggtctcctcgtcctcggccacgactccctcctcggcggccgcggcgacctccggcggcggtaggcccggcctgggcagaggtcgaaacagtaacaaaggactgcctcagtctacgatttcttttgacggaatctatgcaaatatgaggatggttcatatacttacatcagttgttggctccaaatgtgaagtacaagtgaaaaatggaggtatatatgaaggagtttttaaaacctacagtccgaagtgtgatttggtacttgatgccgcacatgagaaaagtacagaatccagttcggggccaaaacgtgaagaaataatggagagtatcttgttcaaatgttcagactttgttgtggtacagtttaaagatatggactccagttatgcaaaaagagatgcttttactgactctgctatcagtgctaaagtgaacggcgaacacaaagagaaggacctggagccctgggatgcaggcgaactcacagccaatgaggaacttgaggctttggaaaatgacgtatctaatggatgggatcccaatgatatgtttcgatataatgaagaaaattatggtgtagtgtctacatatgatagcagtttatcttcatatacggtgcccttagaaagagataactcagaagaatttttaaaacgggaagcaagggcaaaccagttagcagaagaaattgagtcaagtgcccagtacaaagctcgagtggccctggaaaatgatgataggagtgaggaagaaaaatacacagcagttcagagaaattccagtgaacgtgaggggcacagcataaacactagggaaaataaatatattcctcctggacaaagaaatagagaagtcatatcctggggaagtgggagacagaattcaccgcgtatgggccagcctggatcgggctccatgccatcaagatccacttctcacacttcagatttcaacccgaattcttgttcagaccaaagagtagttaatggaggtgttccctggccatcgccttgcccatctccttcctctcgcccaccttctcgctaccagtcaggtcccaactctcttccacctcgggcagccacccctacacggccgccctccaggcccccctcgcggccatccagacccccgtctcacccctctgctcatggttctccagctcctgtctctactatgcctaaacgcatgtcttcagaagggcctccaaggatgtccccaaaggcccagcgacatcctcgaaatcacagagtttctgctgggaggggttccatatccagtggcctagagtttgtatcccacaacccacccagtgaagcagctactcctccagtagcaaggaccagtccctcggggggaacgtggtcatcagtggtcagtggggttccaagattatcccctaaaactcatagacccaggtctcctagacagaacagtattggaaatacccccagtgggccagttcttgcttctccccaagctggtattattccaactgaagctgttgccatgcctattccagctgcatctcctacgcctgctagtcctgcatcgaacagagctgttaccccttctagtgaggctaaagattccagacttcaagatcaaaggcagaactctcctgcagggaataaagaaaatattaagcccaatgaaacatcacctagcttctcaaaagctgaaaacaaaggtatatcaccaattgtttctgaacatagaaaacagattgatgatttaaagaaatttaagaatgattttaggttacagccaagttctacttctgaatctatggatcaactactaaacaaaaatagagaggcagaaaaatcaagagatttgatcaaagacaaaattgaaccaagtgctaaggattctttcactgaaaatagcagcagcaactgtaccagtggcagcagcaagccgaatagccccagcatttccccttcaatacttagtaacacggagcacaagaggggacctgaggtcacttcccaaggggttcagacttccagtccagcatgtaaacaagagaaagatgataaggaagagaagaaagacgcagctgagcaagttaggaaatcaacattgaatcctaatgcaaaggagttcaacccacgttccttctctcagccaaagccttctactaccccaacttcacctcggcctcaagcacaacctagcccatctatggtgggtcatcaacagccaactccagtttatactcagcctgtttgttttgcaccaaatatgatgtatccagtcccagtgagcccaggcgtgcaacctttgtacccaatacctatgacgcccatgccagtgaatcaagccaagacatatagagcagtaccaaatatgccccaacagcggcaagaccagcatcatcagagtgccatgatgcatccagcgtcagcagcgggcccaccgattgcagccaccccaccagcttactccacgcaatatgttgcctacagtcctcagcagttcccaaatcagccccttgttcagcatgtgccacattatcagtctcagcatcctcatgtctatagtcctgtaatacagggtaatgctagaatgatggcaccaccaacacatgcccagcctggtttagtgtcttcttcagcaactcagtacggggctcatgagcagacgcatgcgatgtatgcatgtcccaaattaccatacaacaaggagacaagcccttctttctactttgccatttccacgggctcccttgctcagcagtatgcgcaccctaacgctaccctgcacccacatactccacaccctcagccttcagctacccccactggacagcagcaaagccaacatggtggaagtcatcctgcacccagccctgttcagcaccatcagcaccaggccgcccaggctctccatctggccagtccacagcagcagtcagccatttaccacgcggggcttgcaccaactccaccctccatgacacctgcctccaacacgcagtcgccacagaatagtttcccagcagcacaacagaccgtctttacgatccatccttctcacgttcagccggcgtataccaacccaccccacatggcccacgtacctcaggctcatgtacagtcaggaatggttccttctcatccaactgcccatgcgccaatgatgctaatgacgacacagccacccggcggtccccaggccgccctcgctcaaagtgcactacagcccattccagtctcgacaactgcgcatttcccctatatgacgcacccttcagtacaagcccaccaccaacagcagttgtaaggctgccctggaggaaacgaaaggccaaattccctcctcccttctactgcttctaccaactggaagcacagaaaactagaatttcatttattttgtttttaaaatatatatgttgatttcttgtaacatccaataggaatgctaacagttcacttgcagtggaagatatttggaccgagtagaggcatttaggaacttgggggctattccataattccatacgctgtttcagagtcccacaggtaccccagctctgcttgccgaaactggaagttatttattttttaataacccttgaaagtcatgaacacatcagctagcaaaagaagtaacaagagtgattcttgctgctattactgcttaaaaaaaaaaaaaaaaaaaatcaagacttggaacgcccttttactaaacttgacaaaggttcagtaaattcttaccgtcaaactgacggattattatttataaatcaagtttgatgaggtgatcactgtctacagtggttcaacttttaagttaagggaaaaacttttactttgtagataatataaaataaaaactttaaaaaaatttaaaaaataaaaaaagttttaaaaactga

SEQ ID NO: 4 - DNA, 4666 bp, Macaca fascicularis
tcagtttttaaaactttttttattttttaaatttttttaaagtttttattttatattatctacaaagtaaaagtttttcccttaacttaaaagttgaaccactgtagacagtgatcacctcatcaaacttgatttataaataataatccgtcagtttgacggtaagaatttactgaacctttgtcaagtttagtaaaagggcgttccaagtcttgattttttttttttttttttttaagcagtaatagcagcaagaatcactcttgttacttcttttgctagctgatgtgttcatgactttcaagggttattaaaaaataaataacttccagtttcggcaagcagagctggggtacctgtgggactctgaaacagcgtatggaattatggaatagcccccaagttcctaaatgcctctactcggtccaaatatcttccactgcaagtgaactgttagcattcctattggatgttacaagaaatcaacatatatattttaaaaacaaaataaatgaaattctagttttctgtgcttccagttggtagaagcagtagaagggaggagggaatttggcctttcgtttcctccagggcagccttacaactgctgttggtggtgggcttgtactgaagggtgcgtcatataggggaaatgcgcagttgtcgagactggaatgggctgtagtgcactttgagcgagggcggcctggggaccgccgggtggctgtgtcgtcattagcatcattggcgcatgggcagttggatgagaaggaaccattcctgactgtacatgagcctgaggtacgtgggccatgtggggtgggttggtatacgccggctgaacgtgagaaggatggatcgtaaagacggtctgttgtgctgctgggaaactattctgtggcgactgcgtgttggaggcaggtgtcatggagggtggagttggtgcaagccccgcgtggtaaatggctgactgctgctgtggactggccagatggagagcctgggcggcctggtgctgatggtgctgaacagggctgggtgcaggatgacttccaccatgttggctttgctgctgtccagtgggggtagctgaaggctgagggtgtggagtatgtgggtgcagggtagcgttagggtgcgcatactgctgagcaagggagcccgtggaaatggcaaagtagaaagaagggcttgtctccttgttgtatggtaatttgggacatgcatacatcgcatgcgtctgctcatgagccccgtactgagttgctgaagaagacactaaaccaggctgggcatgtgttggtggtgccatcattctagcattaccctgtattacaggactatagacatgaggatgctgagactgataatgtggcacatgctgaacaaggggctgatttgggaactgctgaggactgtaggcaacatattgcgtggagtaagctggtggggtggctgcaatcggtgggcccgctgctgacgctggatgcatcatggcactctgatgatgctggtcttgccgctgttggggcatatttggtactgctctatatgtcttggcttgattcactggcatgggcgtcataggtattgggtacaaaggttgcacgcctgggctcactgggactggatacatcatatttggtgcaaaacaaacaggctgagtataaactggagttggctgttgatgacccaccatagatgggctaggttgtgcttgaggccgaggtgaagttggggtagtagaaggctttggctgagagaaggaacgtgggttgaactcctttgcattaggattcaatgttgatttcctaacttgctcagctgcgtctttcttctcttccttatcatctttctcttgtttacatgctggactggaagtctgaaccccttgggaagtgacctcaggtcccctcttgtgctccgtgttactaagtattgaaggggaaatgctggggctattcggcttgctgctgccactggtacagttgctgctgctattttcagtgaaagaatccttagcacttggttcaattttgtctttgatcaaatctcttgatttttctgcctctctatttttgtttagtagttgatccatagattcagaagtagaacttggctgtaacctaaaatcattcttaaatttctttaaatcatcaatctgttttctatgttcagaaacaattggtgatatacctttgttttcagcttttgagaagctaggtgatgtttcattgggcttaatattttctttattccctgcaggagagttctgcctttgatcttgaagtctggaatctttagcctcactagaaggggtaacagctctgttcgatgcaggactagcaggcgtaggagatgcagctggaataggcatggcaacagcttcagttggaataataccagcttggggagaagcaagaactggcccactgggggtatttccaatactgttctgtctaggagacctgggtctatgagttttaggggataatcttggaaccccactgaccactgatgaccacgttccccccgagggactggtccttgctactggaggagtagctgcttcactgggtgggttgtgggatacaaactctaggccactggatatggaacccctcccagcagaaactctgtgatttcgaggatgtcgctgggcctttggggacatccttggaggcccttctgaagacatgcgtttaggcatagtagagacaggagctggagaaccatgagcagaggggtgagacgggggtctggatggccgcgaggggggcctggagggcggccgtgtaggggtggctgcccgaggtggaagagagttgggacctgactggtagcgagaaggtgggcgagaggaaggagatgggcaaggcgatggccagggaacacctccattaactactctttggtctgaacaagaattcgggttgaaatctgaagtgtgagaagtggatcttgatggcatggagcccgatccaggctggcccatacgcggtgaattctgtctcccacttccccaggatatgacttctctatttctttgtccaggaggaatatatttattttccctagtgtttatgctgtgcccctcacgttcactggaatttctctgaactgctgtgtatttttcttcctcactcctatcatcattttccagggccactcgagctttgtactgggcacttgactcaatttcttctgctaactggtttgcccttgcttcccgttttaaaaattcttctgagttatctctttctaagggcaccgtatatgaagataaactgctatcatatgtagacactacaccataattttcttcattatatcgaaacatatcattgggatcccatccattagatacgtcattttccaaagcctcaagttcctcattggctgtgagttcgcctgcatcccagggctccaggtccttctctttgtgttcgccgttcactttagcactgatagcagagtcagtaaaagcatctctttttgcataactggagtccatatctttaaactgtaccacaacaaagtctgaacatttgaacaagatactctccattatttcttcacgttttggccccgaactggattctgtacttttctcatgtgcggcatcaagtaccaaatcacacttcggactgtaggttttaaaaactccttcatatatacctccatttttcacttgtacttcacatttggagccaacaactgatgtaagtatatgaaccatcctcatatttgcatagattccgtcaaaagaaatcgtagactgaggcagtcctttgttactgtttcgacctctgcccaggccgggcctaccgccgccggaggtcgccgcggccgccgaggagggagtcgtggccgaggacgaggagaccgaggacgacgacggcgaaggcgaggcggcgggcgacgctagaaggccgctgccgccgggcttgcggacattggcagccgcgggcggctgctgctgctgctgctgctgctgttgctgctgctgctgctgctgctggggcttcagcgacatggtgaggggcccatacaccggctcgcacgccgggcggggacagccgggagccgggcgcgccgaggagacgccggagcgcggcggggacgcgcgggcgccgagcagggaggcgcgggttggcgcggccgggggggcacccgggctgccgcgggggagaaggaggacgacgaaggggcggggaggcccgccgagaccgaggagctgcggggagccgggccggaacgcgccaccgccgttgccgttgcaaccaaaacagtctgaggcggagggaggcgagcgctgccgggagggaggggggccagggccgggcgggggaggggcggcggagggatactgtccagaggccgcgccaccgccgccccgcccgttccgctgcgccggccgctggagcgagcgccacccgggccagttggctgcggcgaaggggcgagacttggtgcccgccacgggactccgaggagctgcggccactgagcgcatcggaggccgggcgcgccgaggcgccgggggagcgcggaggtgcggtagggactctttaccggaagtcggaggggtcgggcggaagcagaacgtgagtggccccggggccgggagggacacgtgagggcgccgcgctgggccgctttcgcg

SEQ ID NO: 5 - DNA, 4505 bp, Mus musculus
ccgtccgcgtccgccagcccgggtcccatgcgttcgtccaccgccgccgctcagcggcccgcggcgggggaccccgagccgcgccgcccggcgggctgggccgcgcggcgctcgctcccgcggacggcgcggcgcggcgggcggggcggcgcggtggcgtatccctccgccggccctcccccgcgcggccccggcgcccctccccgcgggccgcgctcgccaccctgcgcctcagactgttttggtagcaacggccacggcgcgtcccggcccggctcccggcggctgctcggtgtctgcgggcctccccgccccttcgtcgttgtcctgctgcctctggcccccgcggccacgccggcccgcgcctgcccgcccggcgtccgcgcgtccccgccgcgctccggcgtctcctcctcggcgcgcccggcacccggctgtccccgcccggcgtgcgagccggtgtatgggccgctcaccatgtcgctgaagccgcagccgcagccgcccgcgcccgccactggccgcaagcccggcggcggcctgctctcgtcgcccggcgccgcgccggcctcggccgcggtgacctcggcttccgtggtgccggccccggccgcgccggtggcgtcttcctcggcggccgcgggcggcgggcgtcccggcctgggcagaggtcggaacagtagcaaaggactgcctcagcctacgatttcttttgatggaatctatgcaaacgtgaggatggttcatatacttacgtcagttgttggatcgaaatgtgaagtacaagtgaaaaacggaggcatatatgaaggagtttttaaaacatacagtcctaagtgtgacttggtacttgatgctgcacatgagaaaagtacagaatccagttcggggccaaaacgtgaagaaataatggagagtgttttgttcaaatgctcagacttcgttgtggtacagtttaaagatacagactccagttatgcacggagagatgcttttactgactctgctctcagcgcaaaggtgaatggtgagcacaaggagaaggacctggagccctgggatgcaggggagctcacggccagcgaggagctggagctggagaatgatgtgtctaatggatgggaccccaatgacatgtttcgatataatgaagagaattatggtgtggtgtccacatatgatagcagtttatcttcatatacggttcctttagaaagggacaactcagaagaatttcttaaacgggaggcaagggcaaaccagttagcagaagaaattgaatccagtgctcagtacaaagctcgtgtcgcccttgagaatgatgaccggagtgaggaagaaaaatacacagcagtccagagaaactgcagtgaccgggaggggcatggccccaacactagggacaataaatatattcctcctggacaaagaaacagagaagtcctatcctggggaagtgggagacagagctcaccacggatgggccagcctgggccaggctccatgccgtcaagagctgcttctcacacttcagatttcaacccgaacgctggctcagaccaaagagtagttaatggaggtgttccctggccatcgccttgcccatctccttcctctcgcccaccttctcgctaccagtcaggtcccaactctcttccacctcgggcagccacccctacacggccgccctccaggcccccctcgaggccctccagacccccgtctcacccctctgctcatggttctccagctcctgtctctactatgcctaaacgcatgtcttcagaaggacccccaaggatgtctccaaaggcacagcgccaccctcggaatcacagagtctctgctgggagaggctccatgtctagtggcctagaatttgtatcccacaatcccccaagtgaagcagctgctcctccagtggcaaggaccagtcctgcagggggaacgtggtcctcagtggtcagtggggttccaaggttatctcccaaaactcacagacccaggtctcccaggcagagcagcattggaaactctcccagcgggcctgtgcttgcttctccccaagctggcatcatccctgcagaagccgtttccatgcctgttcccgccgcatctccgactcctgccagccctgcatccaacagagcactgaccccatctattgaggcaaaagattccaggcttcaagatcagaggcagaactctcctgcagggagtaaagaaaatgttaaagcaagtgaaacatcacctagcttttcaaaagctgacaacaaaggtatgtcaccagttgtttctgaacacagaaaacagattgatgacttaaagaagtttaagaatgattttaggttacagccaagctctacatctgaatctatggatcaactactaagcaaaaatagagaaggagaaaagtcacgagatttgattaaagataaaacggaagcaagtgctaaggatagtttcattgacagcagcagcagcagcagcaactgtaccagtggcagcagcaagaccaacagccctagcatctccccttccatgcttagtaatgcagagcacaagagggggcctgaggtcacatcccaaggggtgcagacttccagcccagcctgcaaacaagagaaggatgacagagaagagaagaaagacacaacagagcaggttaggaaatcgacattgaatcccaatgcaaaggagttcaaccctcgttctttctctcagccaaagccttctactaccccaacgtcacctcggcctcaagcacaacccagcccatctatggtgggtcatcagcagccagctccagtgtacactcagcctgtgtgcttcgcacccaatatgatgtatcccgtcccagtgagcccgggcgtacaacctttatacccaatacctatgacgcccatgcctgtgaaccaagccaagacatatagagcaggtaaagtaccaaatatgccccaacagcgacaagaccaacatcatcaaagcaccatgatgcacccagcctccgcggcagggccacccatcgtagccaccccgcccgcttactccactcagtacgttgcctacagccctcagcagtttcccaatcagcctttggtccagcatgtgccgcattatcagtctcagcatcctcatgtgtacagtcctgtcatacaaggtaatgccaggatgatggcaccaccagcacatgctcagcctggtttagtgtcttcttcagctgctcagttcggggctcacgagcagacgcacgccatgtatgcatgtcccaaattaccatacaacaaggagacaagcccttctttctactttgccatttccaccggctccctcgctcagcagtatgcacatcctaatgccgccctgcatccacatactccccatcctcagccttcggccactcccaccggacagcagcaaagccagcatggtggaagtcaccctgcacccagtcctgttcagcaccatcagcaccaggctgcccaggctcttcatctggccagtccacagcagcagtcggccatttatcatgcggggctggcaccaacaccaccttccatgacacctgcctctaatacacagtctccacagagcagtttcccagcagcacaacagacagtcttcaccatccacccttctcatgttcagccggcatacaccaccccaccccacatggcccacgtacctcaggctcatgtacagtcaggaatggttccttctcatccaactgcccatgcgccaatgatgctaatgacgacacagccacccggcggtccccaggccgccctcgctcaaagtgcactacagcccattccagtctcgacaacagcgcatttcccttatatgacgcacccttcagtacaagcccaccaccaacagcagttgtaaggctgccctggaggaaccgaaaggccaaatcccctcctcccttctcctgcttctgccaaccggaagcacagaaaactagaacttcattgattttgttttttaaaagatacactgatttaacatctgataggaatgctaacagctcacttgcagtggaggatgttttggaccgagtagaggcatgtagggacttgtggctgttccataattccatgtgctgttgcagggtcctgcaagtacccagctctgcttgctgaaactggaagttatttattttttaatggcccttgagagtcatgaacacatcagctagcaacagaagtaacaagagtgattcttgctgctattaccgctttaaaaaaaaaaaatcaagacttggaacgcccttttactaaacttgacagaagttcagtaaattcttaccgccaaactgacggattattatttataaatcaagtttgatgaggcgatcactgtctacagtggttcaacttttaagttaagggaaaacttttactttgtagataatataaaataaaaactaaaaaaaaaaattaaaaaataaaaaaagttttaaaaactgaaaaaaaaaaaaaaaaaaaaaaaaaaaaaaaaaa

SEQ ID NO: 6 - DNA, 4505 bp, Mus musculus
ttttttttttttttttttttttttttttttttttcagtttttaaaactttttttattttttaatttttttttttagtttttattttatattatctacaaagtaaaagttttcccttaacttaaaagttgaaccactgtagacagtgatcgcctcatcaaacttgatttataaataataatccgtcagtttggcggtaagaatttactgaacttctgtcaagtttagtaaaagggcgttccaagtcttgattttttttttttaaagcggtaatagcagcaagaatcactcttgttacttctgttgctagctgatgtgttcatgactctcaagggccattaaaaaataaataacttccagtttcagcaagcagagctgggtacttgcaggaccctgcaacagcacatggaattatggaacagccacaagtccctacatgcctctactcggtccaaaacatcctccactgcaagtgagctgttagcattcctatcagatgttaaatcagtgtatcttttaaaaaacaaaatcaatgaagttctagttttctgtgcttccggttggcagaagcaggagaagggaggaggggatttggcctttcggttcctccagggcagccttacaactgctgttggtggtgggcttgtactgaagggtgcgtcatataagggaaatgcgctgttgtcgagactggaatgggctgtagtgcactttgagcgagggcggcctggggaccgccgggtggctgtgtcgtcattagcatcattggcgcatgggcagttggatgagaaggaaccattcctgactgtacatgagcctgaggtacgtgggccatgtggggtggggtggtgtatgccggctgaacatgagaagggtggatggtgaagactgtctgttgtgctgctgggaaactgctctgtggagactgtgtattagaggcaggtgtcatggaaggtggtgttggtgccagccccgcatgataaatggccgactgctgctgtggactggccagatgaagagcctgggcagcctggtgctgatggtgctgaacaggactgggtgcagggtgacttccaccatgctggctttgctgctgtccggtgggagtggccgaaggctgaggatggggagtatgtggatgcagggcggcattaggatgtgcatactgctgagcgagggagccggtggaaatggcaaagtagaaagaagggcttgtctccttgttgtatggtaatttgggacatgcatacatggcgtgcgtctgctcgtgagccccgaactgagcagctgaagaagacactaaaccaggctgagcatgtgctggtggtgccatcatcctggcattaccttgtatgacaggactgtacacatgaggatgctgagactgataatgcggcacatgctggaccaaaggctgattgggaaactgctgagggctgtaggcaacgtactgagtggagtaagcgggcggggtggctacgatgggtggccctgccgcggaggctgggtgcatcatggtgctttgatgatgttggtcttgtcgctgttggggcatatttggtactttacctgctctatatgtcttggcttggttcacaggcatgggcgtcataggtattgggtataaaggttgtacgcccgggctcactgggacgggatacatcatattgggtgcgaagcacacaggctgagtgtacactggagctggctgctgatgacccaccatagatgggctgggttgtgcttgaggccgaggtgacgttggggtagtagaaggctttggctgagagaaagaacgagggttgaactcctttgcattgggattcaatgtcgatttcctaacctgctctgttgtgtctttcttctcttctctgtcatccttctcttgtttgcaggctgggctggaagtctgcaccccttgggatgtgacctcaggccccctcttgtgctctgcattactaagcatggaaggggagatgctagggctgttggtcttgctgctgccactggtacagttgctgctgctgctgctgctgtcaatgaaactatccttagcacttgcttccgttttatctttaatcaaatctcgtgacttttctccttctctatttttgcttagtagttgatccatagattcagatgtagagcttggctgtaacctaaaatcattcttaaacttctttaagtcatcaatctgttttctgtgttcagaaacaactggtgacatacctttgttgtcagcttttgaaaagctaggtgatgtttcacttgctttaacattttctttactccctgcaggagagttctgcctctgatcttgaagcctggaatcttttgcctcaatagatggggtcagtgctctgttggatgcagggctggcaggagtcggagatgcggcgggaacaggcatggaaacggcttctgcagggatgatgccagcttggggagaagcaagcacaggcccgctgggagagtttccaatgctgctctgcctgggagacctgggtctgtgagttttgggagataaccttggaaccccactgaccactgaggaccacgttccccctgcaggactggtccttgccactggaggagcagctgcttcacttgggggattgtgggatacaaattctaggccactagacatggagcctctcccagcagagactctgtgattccgagggtggcgctgtgcctttggagacatccttgggggtccttctgaagacatgcgtttaggcatagtagagacaggagctggagaaccatgagcagaggggtgagacgggggtctggagggcctcgaggggggcctggagggcggccgtgtaggggtggctgcccgaggtggaagagagttgggacctgactggtagcgagaaggtgggcgagaggaaggagatgggcaaggcgatggccagggaacacctccattaactactctttggtctgagccagcgttcgggttgaaatctgaagtgtgagaagcagctcttgacggcatggagcctggcccaggctggcccatccgtggtgagctctgtctcccacttccccaggataggacttctctgtttctttgtccaggaggaatatatttattgtccctagtgttggggccatgcccctcccggtcactgcagtttctctggactgctgtgtatttttcttcctcactccggtcatcattctcaagggcgacacgagctttgtactgagcactggattcaatttcttctgctaactggtttgcccttgcctcccgtttaagaaattcttctgagttgtccctttctaaaggaaccgtatatgaagataaactgctatcatatgtggacaccacaccataattctcttcattatatcgaaacatgtcattggggtcccatccattagacacatcattctccagctccagctcctcgctggccgtgagctcccctgcatcccagggctccaggtccttctccttgtgctcaccattcacctttgcgctgagagcagagtcagtaaaagcatctctccgtgcataactggagtctgtatctttaaactgtaccacaacgaagtctgagcatttgaacaaaacactctccattatttcttcacgttttggccccgaactggattctgtacttttctcatgtgcagcatcaagtaccaagtcacacttaggactgtatgttttaaaaactccttcatatatgcctccgtttttcacttgtacttcacatttcgatccaacaactgacgtaagtatatgaaccatcctcacgtttgcatagattccatcaaaagaaatcgtaggctgaggcagtcctttgctactgttccgacctctgcccaggccgggacgcccgccgcccgcggccgccgaggaagacgccaccggcgcggccggggccggcaccacggaagccgaggtcaccgcggccgaggccggcgcggcgccgggcgacgagagcaggccgccgccgggcttgcggccagtggcgggcgcgggcggctgcggctgcggcttcagcgacatggtgagcggcccatacaccggctcgcacgccgggcggggacagccgggtgccgggcgcgccgaggaggagacgccggagcgcggcggggacgcgcggacgccgggcgggcaggcgcgggccggcgtggccgcgggggccagaggcagcaggacaacgacgaaggggcggggaggcccgcagacaccgagcagccgccgggagccgggccgggacgcgccgtggccgttgctaccaaaacagtctgaggcgcagggtggcgagcgcggcccgcggggaggggcgccggggccgcgcgggggagggccggcggagggatacgccaccgcgccgccccgcccgccgcgccgcgccgtccgcgggagcgagcgccgcgcggcccagcccgccgggcggcgcggctcggggtcccccgccgcgggccgctgagcggcggcggtggacgaacgcatgggacccgggctggcggacgcggacgg

SEQ ID NO: 7 - DNA, 7067 bp, Rattus norvegicus
caggctggcctgtgcattttaagtgctgggattaaaggtgtgtaccacgacacctgttttcaatggttcctttttacttttctcttttctgaagttactccagaatatgtactcacacctgaagttttggaattaggcacctcagatgagagaggacatgtgacatttgtctttatgggtatgggtttccttactaaatatgtttttttctagttccaactatttacccagctggaccctaaggaggaggtggctcttttaaagacaggttctcacatagtctaggctgggtgcaagttctcgagtagctgaggctggccttgaacccacagagatcgactgcctctgcctccccagtgttaggattaatggcatgggctaccacggtctgtcaaattgcttctgttttaagacttatgttttaagtctttgcagtgcttgcaaaggccagaagaggatgttagattctcctaatcttaagagttacaggcaatttcgagctaccccacaatgttgctataatagaatcagacctgtggaagaacctttaataccgaaccatctttgtggtccagaccttgaactcctgatcctgcttcttagtgctaggattgcaagtgtgtgtcactgtacctgatttttgtgtggtactggggggaaaaccagggctggctacactctactaactcagcctgtcttttaacccttaattgtaaagtttgaagggtgccaggaagttcttgggttgtgataggatcctaagagtaagaacgcataccccgggaacaaaagcccgggcatcgatgaggtgcgcctagctgcagcaggccttactgcacatggagtgggttgggtggtttgggtcaaggttcacgtccatcaattgtgaaacaggtggttggtcagagtccagtgcgaaacattggacttggctcatagccagacccaggacaagttagaagtcaggttcttcaggtttttcaattctttttttttccttctcttttcaaatggctcctgactggaatgtacaggtcagaggacaacctgtgagagttctctctatgaggacccagaggatagaacgcgggttgtcaggcttggtggcaagtgccttcacctgctgaggcactctgcaggtgacaagaacatttttacagtgtgcgaagcatagcattctagaatctctggaagaaatgagaggccatccagcctaagccagctgtcctgagtgagtgaggtgaggaagacagttggagagtggagagactaggtagtgggctgccttggagttctgctagcctgctgccgtgagttggcaaccctgctctaggcaagctcttcattgacttttcagattttgactcaagtggagcgtgtggttgctctatgaagatggaatttcaaaggctggacagaggtcccagtgcttaaggacattggccgcatgtacaggacctgggtttgtttgtcagcactcacacggctgctcagaacattctgtaacaccagttcctggggatcagtgtcctccgggccctgtgggcaccaggcacatagaaggtgcacagacatgcaggcaggcgggcgctcagccacacgtacatttaaaacaaaaaatccaaaaaacccaacaactttaaaatgggatttcagttgtgttgttcacaacgtgtggaagagaaatgtaggattccttgttatttgtgagaaactcaatcttttcccttagaagaaggcttaggttgtgcaggctctattgaactaacagaggatggaaaggattggtggaaactgtaccagcaaggactgtgcatcgtggtttcgtttgtctttcttgtcattctctaaatacagtcgtgtgtgtacattctctaaatacagtcgctacagtgtagcgtttacatttgactggatattaaatactaaacatctttgaacatctttgaattttgcttctgatgggatctcggacaaatcctctagttcacttgaaaatagtccccgttacacggcaccatttgatagctgagtttatgttgtttaatgcgggctttgtttgtctctgcagtgctggaacctgagcttaggactcaaagccactaagcaagcacacttgaccaccgagtgagccaccccagcctggcagctgagtcttgtgtgctgtgtctttctaagggagagggtggtaaggaaaggcttggtgaacaattcctgagttttgacagtgtagcccaggctagctcactgcctaagctgggattacagctgtggaccacgaggcctgccatatcacatgccagatctgacagagacgtggtgtttagaagtcaaagtgtttataattatctctgatgtttaaacattgatttatttgtgtgtgtgtgtatgtgtgtgtgtgtggtgtgtggggtgtgtgggtgtgcatgtgtgtgtgtgtgtgtgtcccagcatacatgtagtgggcagaggacagtttatagaagttgattctccttttgttgtatggtcctggggattgaattcaagtcttcagacttgtagctaatgccttctgagccttctgaaaagccctgctttaacttaattttggtagttttttcctgcagttataaacacttagttgcttttagagatggagaaaatgagagctgattggggtgtcagtcagctctgttgatcccaagtgtgtgccaccgcgccttgcttctaagagtacggctgctttgcgtgccattgtccttcagtcccttactggggtagggagatgaggtgtgctctacagccctggctgagctcacacatggcatcccactgcctcagcctctgaagggtgagtgcagccacacactgctcactacactgcaccagctcagctggcttcactctatgcatttggttttgtttatttagcttttagggtcaaggtctcactcagtagctctggctgtcctggaattcactgtgtagagcaggctgcctgcttctgtctcccgagagctgggattacatgcatgtggcactccacctgcctcaccggtttgggtttgataaagcgagttgtgtttcgtcttcctctctgtggcagtctctccctggcctggtagcacacagccactgagatttcctgtcacacaggatggccccttccacactcagcctggcctgtgtttgagtagaattagaagattatattttatgttctctttaatttaaataaaatgaagattgaatttaacaaaacaatatttattaatctttgcagaggtcggaacagtagcaaaggactgcctcagcctacgatttcttttgacggaatctatgcaaacgtgaggatggttcatatacttacatcggttgtgggatcgaaatgtgaagtacaagtgaaaaacggaggtgtatatgaaggagtttttaaaacatacagtcctaagtgtgatttggtacttgatgctgcacatgagaaaagtacagaatccagttcggggccaaaacgtgaagaaataatggagagtgttttgttcaaatgctcagacttcgttgtggtacaatttaaagatacagactcgagttatgcacgaagagatgctttcactgactctgctctcagtgctaaagtgaatggtgaacacaaggagaaggacctggagccctgggatgcaggggagctcacagccagcgaggagctggaggctctggagaatgatgtgtctaacggatgggatcccaatgatatgtttcgatataatgaagagaattacggtgtggtgtccacatacgatagtagtttatcttcatatacggttcccttagaaagggacaactcagaagaatttctaaaacgggaggcaagggcaaaccagttagcagaagaaatcgagtccagtgctcagtacaaagctcgtgtggcccttgagaatgatgaccggagtgaggaagagaagtacacagcagtccagagaaactgcagtgaccgggaaggtcatggcaccaacactagggaaaataaatatattcctcctggacaaagaaacagagaagtcatatcctggggaagtgggagacagagctcaccacggatgggccagcctggaccaggctccatgccatcaagagctacttctcacacttcagatttcaacccgaatgctggctcagaccaaagagtagttaatggaggtgttccctggccatcgccttgcccatctccttcctctcgcccaccttctcgctaccagtcaggtcccaactctcttccacctcgggcagccacccctacacggccgccctccaggcccccctcgaggccctccagacccccgtctcacccctctgctcatggttctccagctcctgtctctactatgcctaaacgcatgtctgcagaaggcccaccaaggatgtctccaaaggcacagcggcaccctcggaatcatagagtctccgctgggagaggctccatgtctagtggcctagaatttgtatcccacaatcccccaagtgaagcagctgctcctccagtggcaaggaccagtcctgcagggggaacgtggtcctcagtggtcagtggggttccaagactatctcccaaaactcacagacccaggtctcccaggcagaacagcgctggaaactctcccagcgggcctgtgctcgcttctccccaagctggcatcacccctgccgaagccgtttccatgccggtccccgccgcgtcccctactcctgccagccctgcgtccaacagagctctgaccccatctatcgaggcgaaagattccaggcttcaagatcagaggcagaactctcctgcagggaataaagaaaatattaaagcaagtgaaacatcacctagcttttcaaaagctgaaaacaaaggtgtgtcaccagttatctctgaacacagaaaacagatcgatgatttaaagaagtttaagaatgattttaggttacagccaagttctacgtctgaatctatggatcaactactaagcaaaaacagagaaggagaaaagtcacgagatttgatgaaagacaaaacggaagcaagtgctaaggacagcttcattgacagtggcagcagcagctgcaccagcagcagcagcaagaccaacagccccagcgcctccccttctgtgcttagtaatgcagagcacaagagggggcctgaggtcacgtcccagggggtgcagacttccagtccggcctgcaaacaagagaaggatgaccgagaagagcggaaagacacaaccgagcaagttaggaagtcgactttgaatcccaatgcaaaggagttcaaccctcgttctttctctcagccaaagccttctactaccccaacgtcgcctcggcctcaagcccagcccagcccgtccatggtgggtcatcagcagccagctccagtgtacacgcagcctgtgtgctttgcacccaatatgatgtaccctgtcccagtgagcccaggcgtgcagcctttatacccaatacctatgacgcccatgccagtgaaccaagccaagacatatagagcagtaccaaatatgccccaacagcgacaagagcagcaccatcaaagcaccatgatgcaccctgcctccgcagcagggccgcctatcgttgccaccccgcccgccgcttactccacgcagtacgttgcctacagccctcagcagtttcccaaccagcctttggtccagcacgtgccgcattatcagtctcagcatcctcatgtgtacagtcctgtcatacaaggtaatgccaggatgatggcaccaccagcacatgctcagcctggtttagtgtcgtcttcagctgctcagttcggggctcacgagcagacgcatgccatgtatgcatgtcccaaattaccatacaacaaggagacaagcccttctttctactttgccatttccaccggctccctcgctcagcagtacgcacatcctaatgccaccctgcatccacaccctccacatcctcagccttcggccactcccaccggacagcaacaaagccagcatggtggaagtcatcctgcacccagtcctgttcagcaccatcagcaccaggccgcccaggctcttcacctggccagtccacagcagcagtcggccatttatcacgcggggctggcaccaacaccaccttccatgacacctgcctctaatacacagtctccacagagcagtttcccagcagcaccacagacagtcttcaccatccatccttctcatgttcagccggcatacaccaccccaccccacatggcccacgtacctcaggctcatgtacagtcaggaatggttccttctcatccaactgcccatgcgccaatgatgcttatgacgacacagccacccggcggtccccaggccgccctcgctcaaagtgcactacagcccattccagtctcgacaacagcgcatttcccctatatgacgcacccttcagtacaagcccaccaccaacagcagttgtaagtctgccctggaggaaccgaaaggccaaatcccctcctcccttctactgcttctgccaactggaagcacagaaaactagaacttcatttattttgtttttttttttaaaaaagatacactgatttaacatcggtaggaatgctaacagttcacttgcagtggaggatgttctggaccgagtagaggcatgtagggacttgtggctgttccataactccatgtgctgttgcagggtcctcaagtacccagctctgcttgctgaaactggaagttatttattttttaatggcccttgagagtcatgaacacatcagctagcaacagaagtaacaagagtgattcttgctgctattaccgctttaaaaaaaaaaaaatcaagacttggaacgcccttttactaaacttgacagaagttcagtaaattcttaccgccaaactgacggattattatttataaatcaagtttgatgaggcgatcactgtctacagtgattcaacttttaagttaagggaaaacttttactttgtagataatataaaataaaaactaaaaaaaaattaaaaaataaaaaaagttttaaaaactga

SEQ ID NO: 8 - DNA, 7067 bp, Rattus norvegicus
tcagtttttaaaactttttttattttttaatttttttttagtttttattttatattatctacaaagtaaaagttttcccttaacttaaaagttgaatcactgtagacagtgatcgcctcatcaaacttgatttataaataataatccgtcagtttggcggtaagaatttactgaacttctgtcaagtttagtaaaagggcgttccaagtcttgatttttttttttttaaagcggtaatagcagcaagaatcactcttgttacttctgttgctagctgatgtgttcatgactctcaagggccattaaaaaataaataacttccagtttcagcaagcagagctgggtacttgaggaccctgcaacagcacatggagttatggaacagccacaagtccctacatgcctctactcggtccagaacatcctccactgcaagtgaactgttagcattcctaccgatgttaaatcagtgtatcttttttaaaaaaaaaaacaaaataaatgaagttctagttttctgtgcttccagttggcagaagcagtagaagggaggaggggatttggcctttcggttcctccagggcagacttacaactgctgttggtggtgggcttgtactgaagggtgcgtcatataggggaaatgcgctgttgtcgagactggaatgggctgtagtgcactttgagcgagggcggcctggggaccgccgggtggctgtgtcgtcataagcatcattggcgcatgggcagttggatgagaaggaaccattcctgactgtacatgagcctgaggtacgtgggccatgtggggtggggtggtgtatgccggctgaacatgagaaggatggatggtgaagactgtctgtggtgctgctgggaaactgctctgtggagactgtgtattagaggcaggtgtcatggaaggtggtgttggtgccagccccgcgtgataaatggccgactgctgctgtggactggccaggtgaagagcctgggcggcctggtgctgatggtgctgaacaggactgggtgcaggatgacttccaccatgctggctttgttgctgtccggtgggagtggccgaaggctgaggatgtggagggtgtggatgcagggtggcattaggatgtgcgtactgctgagcgagggagccggtggaaatggcaaagtagaaagaagggcttgtctccttgttgtatggtaatttgggacatgcatacatggcatgcgtctgctcgtgagccccgaactgagcagctgaagacgacactaaaccaggctgagcatgtgctggtggtgccatcatcctggcattaccttgtatgacaggactgtacacatgaggatgctgagactgataatgcggcacgtgctggaccaaaggctggttgggaaactgctgagggctgtaggcaacgtactgcgtggagtaagcggcgggcggggtggcaacgataggcggccctgctgcggaggcagggtgcatcatggtgctttgatggtgctgctcttgtcgctgttggggcatatttggtactgctctatatgtcttggcttggttcactggcatgggcgtcataggtattgggtataaaggctgcacgcctgggctcactgggacagggtacatcatattgggtgcaaagcacacaggctgcgtgtacactggagctggctgctgatgacccaccatggacgggctgggctgggcttgaggccgaggcgacgttggggtagtagaaggctttggctgagagaaagaacgagggttgaactcctttgcattgggattcaaagtcgacttcctaacttgctcggttgtgtctttccgctcttctcggtcatccttctcttgtttgcaggccggactggaagtctgcaccccctgggacgtgacctcaggccccctcttgtgctctgcattactaagcacagaaggggaggcgctggggctgttggtcttgctgctgctgctggtgcagctgctgctgccactgtcaatgaagctgtccttagcacttgcttccgttttgtctttcatcaaatctcgtgacttttctccttctctgtttttgcttagtagttgatccatagattcagacgtagaacttggctgtaacctaaaatcattcttaaacttctttaaatcatcgatctgttttctgtgttcagagataactggtgacacacctttgttttcagcttttgaaaagctaggtgatgtttcacttgctttaatattttctttattccctgcaggagagttctgcctctgatcttgaagcctggaatctttcgcctcgatagatggggtcagagctctgttggacgcagggctggcaggagtaggggacgcggcggggaccggcatggaaacggcttcggcaggggtgatgccagcttggggagaagcgagcacaggcccgctgggagagtttccagcgctgttctgcctgggagacctgggtctgtgagttttgggagatagtcttggaaccccactgaccactgaggaccacgttccccctgcaggactggtccttgccactggaggagcagctgcttcacttgggggattgtgggatacaaattctaggccactagacatggagcctctcccagcggagactctatgattccgagggtgccgctgtgcctttggagacatccttggtgggccttctgcagacatgcgtttaggcatagtagagacaggagctggagaaccatgagcagaggggtgagacgggggtctggagggcctcgaggggggcctggagggcggccgtgtaggggtggctgcccgaggtggaagagagttgggacctgactggtagcgagaaggtgggcgagaggaaggagatgggcaaggcgatggccagggaacacctccattaactactctttggtctgagccagcattcgggttgaaatctgaagtgtgagaagtagctcttgatggcatggagcctggtccaggctggcccatccgtggtgagctctgtctcccacttccccaggatatgacttctctgtttctttgtccaggaggaatatatttattttccctagtgttggtgccatgaccttcccggtcactgcagtttctctggactgctgtgtacttctcttcctcactccggtcatcattctcaagggccacacgagctttgtactgagcactggactcgatttcttctgctaactggtttgcccttgcctcccgttttagaaattcttctgagttgtccctttctaagggaaccgtatatgaagataaactactatcgtatgtggacaccacaccgtaattctcttcattatatcgaaacatatcattgggatcccatccgttagacacatcattctccagagcctccagctcctcgctggctgtgagctcccctgcatcccagggctccaggtccttctccttgtgttcaccattcactttagcactgagagcagagtcagtgaaagcatctcttcgtgcataactcgagtctgtatctttaaattgtaccacaacgaagtctgagcatttgaacaaaacactctccattatttcttcacgttttggccccgaactggattctgtacttttctcatgtgcagcatcaagtaccaaatcacacttaggactgtatgttttaaaaactccttcatatacacctccgtttttcacttgtacttcacatttcgatcccacaaccgatgtaagtatatgaaccatcctcacgtttgcatagattccgtcaaaagaaatcgtaggctgaggcagtcctttgctactgttccgacctctgcaaagattaataaatattgttttgttaaattcaatcttcattttatttaaattaaagagaacataaaatataatcttctaattctactcaaacacaggccaggctgagtgtggaaggggccatcctgtgtgacaggaaatctcagtggctgtgtgctaccaggccagggagagactgccacagagaggaagacgaaacacaactcgctttatcaaacccaaaccggtgaggcaggtggagtgccacatgcatgtaatcccagctctcgggagacagaagcaggcagcctgctctacacagtgaattccaggacagccagagctactgagtgagaccttgaccctaaaagctaaataaacaaaaccaaatgcatagagtgaagccagctgagctggtgcagtgtagtgagcagtgtgtggctgcactcacccttcagaggctgaggcagtgggatgccatgtgtgagctcagccagggctgtagagcacacctcatctccctaccccagtaagggactgaaggacaatggcacgcaaagcagccgtactcttagaagcaaggcgcggtggcacacacttgggatcaacagagctgactgacaccccaatcagctctcattttctccatctctaaaagcaactaagtgtttataactgcaggaaaaaactaccaaaattaagttaaagcagggcttttcagaaggctcagaaggcattagctacaagtctgaagacttgaattcaatccccaggaccatacaacaaaaggagaatcaacttctataaactgtcctctgcccactacatgtatgctgggacacacacacacacacacatgcacacccacacaccccacacaccacacacacacacatacacacacacacaaataaatcaatgtttaaacatcagagataattataaacactttgacttctaaacaccacgtctctgtcagatctggcatgtgatatggcaggcctcgtggtccacagctgtaatcccagcttaggcagtgagctagcctgggctacactgtcaaaactcaggaattgttcaccaagcctttccttaccaccctctcccttagaaagacacagcacacaagactcagctgccaggctggggtggctcactcggtggtcaagtgtgcttgcttagtggctttgagtcctaagctcaggttccagcactgcagagacaaacaaagcccgcattaaacaacataaactcagctatcaaatggtgccgtgtaacggggactattttcaagtgaactagaggatttgtccgagatcccatcagaagcaaaattcaaagatgttcaaagatgtttagtatttaatatccagtcaaatgtaaacgctacactgtagcgactgtatttagagaatgtacacacacgactgtatttagagaatgacaagaaagacaaacgaaaccacgatgcacagtccttgctggtacagtttccaccaatcctttccatcctctgttagttcaatagagcctgcacaacctaagccttcttctaagggaaaagattgagtttctcacaaataacaaggaatcctacatttctcttccacacgttgtgaacaacacaactgaaatcccattttaaagttgttgggttttttggattttttgttttaaatgtacgtgtggctgagcgcccgcctgcctgcatgtctgtgcaccttctatgtgcctggtgcccacagggcccggaggacactgatccccaggaactggtgttacagaatgttctgagcagccgtgtgagtgctgacaaacaaacccaggtcctgtacatgcggccaatgtccttaagcactgggacctctgtccagcctttgaaattccatcttcatagagcaaccacacgctccacttgagtcaaaatctgaaaagtcaatgaagagcttgcctagagcagggttgccaactcacggcagcaggctagcagaactccaaggcagcccactacctagtctctccactctccaactgtcttcctcacctcactcactcaggacagctggcttaggctggatggcctctcatttcttccagagattctagaatgctatgcttcgcacactgtaaaaatgttcttgtcacctgcagagtgcctcagcaggtgaaggcacttgccaccaagcctgacaacccgcgttctatcctctgggtcctcatagagagaactctcacaggttgtcctctgacctgtacattccagtcaggagccatttgaaaagagaaggaaaaaaaaagaattgaaaaacctgaagaacctgacttctaacttgtcctgggtctggctatgagccaagtccaatgtttcgcactggactctgaccaaccacctgtttcacaattgatggacgtgaaccttgacccaaaccacccaacccactccatgtgcagtaaggcctgctgcagctaggcgcacctcatcgatgcccgggcttttgttcccggggtatgcgttcttactcttaggatcctatcacaacccaagaacttcctggcacccttcaaactttacaattaagggttaaaagacaggctgagttagtagagtgtagccagccctggttttccccccagtaccacacaaaaatcaggtacagtgacacacacttgcaatcctagcactaagaagcaggatcaggagttcaaggtctggaccacaaagatggttcggtattaaaggttcttccacaggtctgattctattatagcaacattgtggggtagctcgaaattgcctgtaactcttaagattaggagaatctaacatcctcttctggcctttgcaagcactgcaaagacttaaaacataagtcttaaaacagaagcaatttgacagaccgtggtagcccatgccattaatcctaacactggggaggcagaggcagtcgatctctgtgggttcaaggccagcctcagctactcgagaacttgcacccagcctagactatgtgagaacctgtctttaaaagagccacctcctccttagggtccagctgggtaaatagttggaactagaaaaaaacatatttagtaaggaaacccatacccataaagacaaatgtcacatgtcctctctcatctgaggtgcctaattccaaaacttcaggtgtgagtacatattctggagtaacttcagaaaagagaaaagtaaaaaggaaccattgaaaacaggtgtcgtggtacacacctttaatcccagcacttaaaatgcacaggccagcctg

SEQ ID NO: 9 - protein, 16 aa, Artificial
  synthetic
AAVALLPAVLLALLAP

SEQ ID NO: 10 - protein, 11 aa, Artificial
  synthetic
AALLPVLLAAP

SEQ ID NO: 11 - protein, 13 aa, Artificial
  synthetic
GRKKRRQRRRPPQ

SEQ ID NO: 12 - protein, 16 aa, Drosophila melanogaster
RQIKIWFQNRRMKWKK

SEQ ID NO: 13 - RNA, 21 nt, Artificial
  synthetic
uccgacuuccgguaaagaguu

SEQ ID NO: 14 - RNA, 21 nt, Artificial
  synthetic
ccgacuuccgguaaagagucu

SEQ ID NO: 15 - RNA, 21 nt, Artificial
  synthetic
cgacuuccgguaaagaguccu

SEQ ID NO: 16 - RNA, 21 nt, Artificial
  synthetic
aaugugaaguacaagugaaaa

SEQ ID NO: 17 - RNA, 21 nt, Artificial
  synthetic
augugaaguacaagugaaaaa

SEQ ID NO: 18 - RNA, 21 nt, Artificial
  synthetic
caugagaaaaguacagaaucu

SEQ ID NO: 19 - RNA, 21 nt, Artificial
  synthetic
cacuucucacacuucagauuu

SEQ ID NO: 20 - RNA, 21 nt, Artificial
  synthetic
acuucucacacuucagauuuc

SEQ ID NO: 21 - RNA, 21 nt, Artificial
  synthetic
cuucucacacuucagauuuca

SEQ ID NO: 22 - RNA, 21 nt, Artificial
  synthetic
uucucacacuucagauuucaa

SEQ ID NO: 23 - RNA, 21 nt, Artificial
  synthetic
ucucacacuucagauuucaau

SEQ ID NO: 24 - RNA, 21 nt, Artificial
  synthetic
cucacacuucagauuucaacu

SEQ ID NO: 25 - RNA, 21 nt, Artificial
  synthetic
ucacacuucagauuucaaccu

SEQ ID NO: 26 - RNA, 21 nt, Artificial
  synthetic
cacacuucagauuucaacccu

SEQ ID NO: 27 - RNA, 21 nt, Artificial
  synthetic
acuucagauuucaacccgaau

SEQ ID NO: 28 - RNA, 21 nt, Artificial
  synthetic
ucagaccaaagaguaguuaau

SEQ ID NO: 29 - RNA, 21 nt, Artificial
  synthetic
cagaccaaagaguaguuaauu

SEQ ID NO: 30 - RNA, 21 nt, Artificial
  synthetic
cucuacuaugccuaaacgcau

SEQ ID NO: 31 - RNA, 21 nt, Artificial
  synthetic
ucuacuaugccuaaacgcauu

SEQ ID NO: 32 - RNA, 21 nt, Artificial
  synthetic
uacuaugccuaaacgcauguu

SEQ ID NO: 33 - RNA, 21 nt, Artificial
  synthetic
cuucugaaucuauggaucaau

SEQ ID NO: 34 - RNA, 21 nt, Artificial
  synthetic
uucugaaucuauggaucaacu

SEQ ID NO: 35 - RNA, 21 nt, Artificial
  synthetic
ucugaaucuauggaucaacua

SEQ ID NO: 36 - RNA, 21 nt, Artificial
  synthetic
cugaaucuauggaucaacuau

SEQ ID NO: 37 - RNA, 21 nt, Artificial
  synthetic
ugaaucuauggaucaacuacu

SEQ ID NO: 38 - RNA, 21 nt, Artificial
  synthetic
gaaucuauggaucaacuacua

SEQ ID NO: 39 - RNA, 21 nt, Artificial
  synthetic
aaucuauggaucaacuacuaa

SEQ ID NO: 40 - RNA, 21 nt, Artificial
  synthetic
aucuauggaucaacuacuaaa

SEQ ID NO: 41 - RNA, 21 nt, Artificial
  synthetic
uauacccaauaccuaugacgu

SEQ ID NO: 42 - RNA, 21 nt, Artificial
  synthetic
gacauauagagcaguaccaaa

SEQ ID NO: 43 - RNA, 21 nt, Artificial
  synthetic
auauagagcaguaccaaauau

SEQ ID NO: 44 - RNA, 21 nt, Artificial
  synthetic
uauagagcaguaccaaauauu

SEQ ID NO: 45 - RNA, 21 nt, Artificial
  synthetic
auagagcaguaccaaauaugu

SEQ ID NO: 46 - RNA, 21 nt, Artificial
  synthetic
agagcaguaccaaauaugccu

SEQ ID NO: 47 - RNA, 21 nt, Artificial
  synthetic
ugucccaaauuaccauacaau

SEQ ID NO: 48 - RNA, 21 nt, Artificial
  synthetic
ucccaaauuaccauacaacaa

SEQ ID NO: 49 - RNA, 21 nt, Artificial
  synthetic
aagcccuucuuucuacuuugu

SEQ ID NO: 50 - RNA, 21 nt, Artificial
  synthetic
cccuucuuucuacuuugccau

SEQ ID NO: 51 - RNA, 21 nt, Artificial
  synthetic
ccuucuuucuacuuugccauu

SEQ ID NO: 52 - RNA, 21 nt, Artificial
  synthetic
cuucuuucuacuuugccauuu

SEQ ID NO: 53 - RNA, 21 nt, Artificial
  synthetic
uucuuucuacuuugccauuuc

SEQ ID NO: 54 - RNA, 21 nt, Artificial
  synthetic
ucuuucuacuuugccauuucu

SEQ ID NO: 55 - RNA, 21 nt, Artificial
  synthetic
cuuucuacuuugccauuucca

SEQ ID NO: 56 - RNA, 21 nt, Artificial
  synthetic
uuucuacuuugccauuuccau

SEQ ID NO: 57 - RNA, 21 nt, Artificial
  synthetic
uucuacuuugccauuuccacu

SEQ ID NO: 58 - RNA, 21 nt, Artificial
  synthetic
cauguacagucaggaaugguu

SEQ ID NO: 59 - RNA, 21 nt, Artificial
  synthetic
auguacagucaggaaugguuu

SEQ ID NO: 60 - RNA, 21 nt, Artificial
  synthetic
uguacagucaggaaugguucu

SEQ ID NO: 61 - RNA, 21 nt, Artificial
  synthetic
caggaaugguuccuucucauu

SEQ ID NO: 62 - RNA, 21 nt, Artificial
  synthetic
gaaugguuccuucucauccaa

SEQ ID NO: 63 - RNA, 21 nt, Artificial
  synthetic
augguuccuucucauccaacu

SEQ ID NO: 64 - RNA, 21 nt, Artificial
  synthetic
ugguuccuucucauccaacuu

SEQ ID NO: 65 - RNA, 21 nt, Artificial
  synthetic
guuccuucucauccaacugcu

SEQ ID NO: 66 - RNA, 21 nt, Artificial
  synthetic
caugcgccaaugaugcuaauu

SEQ ID NO: 67 - RNA, 21 nt, Artificial
  synthetic
gcgccaaugaugcuaaugacu

SEQ ID NO: 68 - RNA, 21 nt, Artificial
  synthetic
gccaaugaugcuaaugacgau

SEQ ID NO: 69 - RNA, 21 nt, Artificial
  synthetic
ccaaugaugcuaaugacgaca

SEQ ID NO: 70 - RNA, 21 nt, Artificial
  synthetic
augaugcuaaugacgacacau

SEQ ID NO: 71 - RNA, 21 nt, Artificial
  synthetic
ugaugcuaaugacgacacagu

SEQ ID NO: 72 - RNA, 21 nt, Artificial
  synthetic
cgcucaaagugcacuacagcu

SEQ ID NO: 73 - RNA, 21 nt, Artificial
  synthetic
agcccauuccagucucgacaa

SEQ ID NO: 74 - RNA, 21 nt, Artificial
  synthetic
cccauuccagucucgacaaca

SEQ ID NO: 75 - RNA, 21 nt, Artificial
  synthetic
caccaccaacagcaguuguaa

SEQ ID NO: 76 - RNA, 21 nt, Artificial
  synthetic
accaccaacagcaguuguaau

SEQ ID NO: 77 - RNA, 21 nt, Artificial
  synthetic
ccaccaacagcaguuguaagu

SEQ ID NO: 78 - RNA, 21 nt, Artificial
  synthetic
accaacagcaguuguaaggcu

SEQ ID NO: 79 - RNA, 21 nt, Artificial
  synthetic
caacagcaguuguaaggcugu

SEQ ID NO: 80 - RNA, 21 nt, Artificial
  synthetic
cuucuacugcuucuaccaacu

SEQ ID NO: 81 - RNA, 21 nt, Artificial
  synthetic
ucuacugcuucuaccaacugu

SEQ ID NO: 82 - RNA, 21 nt, Artificial
  synthetic
cuacugcuucuaccaacugga

SEQ ID NO: 83 - RNA, 21 nt, Artificial
  synthetic
cugcuucuaccaacuggaagu

SEQ ID NO: 84 - RNA, 21 nt, Artificial
  synthetic
caacuggaagcacagaaaacu

SEQ ID NO: 85 - RNA, 21 nt, Artificial
  synthetic
uugauuucuuguaacauccaa

SEQ ID NO: 86 - RNA, 21 nt, Artificial
  synthetic
auuucuuguaacauccaauau

SEQ ID NO: 87 - RNA, 21 nt, Artificial
  synthetic
uucuuguaacauccaauagga

SEQ ID NO: 88 - RNA, 21 nt, Artificial
  synthetic
ucuuguaacauccaauaggaa

SEQ ID NO: 89 - RNA, 21 nt, Artificial
  synthetic
uguaacauccaauaggaaugu

SEQ ID NO: 90 - RNA, 21 nt, Artificial
  synthetic
uaacauccaauaggaaugcua

SEQ ID NO: 91 - RNA, 21 nt, Artificial
  synthetic
aacauccaauaggaaugcuaa

SEQ ID NO: 92 - RNA, 21 nt, Artificial
  synthetic
acauccaauaggaaugcuaau

SEQ ID NO: 93 - RNA, 21 nt, Artificial
  synthetic
cauccaauaggaaugcuaaca

SEQ ID NO: 94 - RNA, 21 nt, Artificial
  synthetic
aauaggaaugcuaacaguuca

SEQ ID NO: 95 - RNA, 21 nt, Artificial
  synthetic
auaggaaugcuaacaguucau

SEQ ID NO: 96 - RNA, 21 nt, Artificial
  synthetic
uaggaaugcuaacaguucacu

SEQ ID NO: 97 - RNA, 21 nt, Artificial
  synthetic
aggaaugcuaacaguucacuu

SEQ ID NO: 98 - RNA, 21 nt, Artificial
  synthetic
ggaaugcuaacaguucacuuu

SEQ ID NO: 99 - RNA, 21 nt, Artificial
  synthetic
gaaugcuaacaguucacuugu

SEQ ID NO: 100 - RNA, 21 nt, Artificial
  synthetic
gcuaacaguucacuugcaguu

SEQ ID NO: 101 - RNA, 21 nt, Artificial
  synthetic
caguucacuugcaguggaaga

SEQ ID NO: 102 - RNA, 21 nt, Artificial
  synthetic
gaccgaguagaggcauuuagu

SEQ ID NO: 103 - RNA, 21 nt, Artificial
  synthetic
accgaguagaggcauuuagga

SEQ ID NO: 104 - RNA, 21 nt, Artificial
  synthetic
ggcuauuccauaauuccauau

SEQ ID NO: 105 - RNA, 21 nt, Artificial
  synthetic
ugccgaaacuggaaguuauuu

SEQ ID NO: 106 - RNA, 21 nt, Artificial
  synthetic
ccgaaacuggaaguuauuuau

SEQ ID NO: 107 - RNA, 21 nt, Artificial
  synthetic
cgaaacuggaaguuauuuauu

SEQ ID NO: 108 - RNA, 21 nt, Artificial
  synthetic
gaaacuggaaguuauuuauuu

SEQ ID NO: 109 - RNA, 21 nt, Artificial
  synthetic
aaacuggaaguuauuuauuuu

SEQ ID NO: 110 - RNA, 21 nt, Artificial
  synthetic
uaauaacccuugaaagucauu

SEQ ID NO: 111 - RNA, 21 nt, Artificial
  synthetic
aauaacccuugaaagucauga

SEQ ID NO: 112 - RNA, 21 nt, Artificial
  synthetic
aacccuugaaagucaugaaca

SEQ ID NO: 113 - RNA, 21 nt, Artificial
  synthetic
cuugaaagucaugaacacauu

SEQ ID NO: 114 - RNA, 21 nt, Artificial
  synthetic
agucaugaacacaucagcuau

SEQ ID NO: 115 - RNA, 21 nt, Artificial
  synthetic
gucaugaacacaucagcuagu

SEQ ID NO: 116 - RNA, 21 nt, Artificial
  synthetic
ucaugaacacaucagcuagca

SEQ ID NO: 117 - RNA, 21 nt, Artificial
  synthetic
caugaacacaucagcuagcaa

SEQ ID NO: 118 - RNA, 21 nt, Artificial
  synthetic
augaacacaucagcuagcaaa

SEQ ID NO: 119 - RNA, 21 nt, Artificial
  synthetic
augaacacaucagcuagcaaa

SEQ ID NO: 120 - RNA, 21 nt, Artificial
  synthetic
ugaacacaucagcuagcaaaa

SEQ ID NO: 121 - RNA, 21 nt, Artificial
  synthetic
gaacacaucagcuagcaaaau

SEQ ID NO: 122 - RNA, 21 nt, Artificial
  synthetic
aacacaucagcuagcaaaaga

SEQ ID NO: 123 - RNA, 21 nt, Artificial
  synthetic
caucagcuagcaaaagaagua

SEQ ID NO: 124 - RNA, 21 nt, Artificial
  synthetic
cuagcaaaagaaguaacaaga

SEQ ID NO: 125 - RNA, 21 nt, Artificial
  synthetic
guaacaagagugauucuugcu

SEQ ID NO: 126 - RNA, 21 nt, Artificial
  synthetic
uaacaagagugauucuugcuu

SEQ ID NO: 127 - RNA, 21 nt, Artificial
  synthetic
aacaagagugauucuugcugu

SEQ ID NO: 128 - RNA, 21 nt, Artificial
  synthetic
agagugauucuugcugcuauu

SEQ ID NO: 129 - RNA, 21 nt, Artificial
  synthetic
gagugauucuugcugcuauua

SEQ ID NO: 130 - RNA, 21 nt, Artificial
  synthetic
gugauucuugcugcuauuacu

SEQ ID NO: 131 - RNA, 21 nt, Artificial
  synthetic
uuggaacgcccuuuuacuaaa

SEQ ID NO: 132 - RNA, 21 nt, Artificial
  synthetic
uggaacgcccuuuuacuaaau

SEQ ID NO: 133 - RNA, 21 nt, Artificial
  synthetic
gaacgcccuuuuacuaaacuu

SEQ ID NO: 134 - RNA, 21 nt, Artificial
  synthetic
aacgcccuuuuacuaaacuuu

SEQ ID NO: 135 - RNA, 21 nt, Artificial
  synthetic
acgcccuuuuacuaaacuuga

SEQ ID NO: 136 - RNA, 21 nt, Artificial
  synthetic
cgcccuuuuacuaaacuugau

SEQ ID NO: 137 - RNA, 21 nt, Artificial
  synthetic
guuucaguaaauucuuaccgu

SEQ ID NO: 138 - RNA, 21 nt, Artificial
  synthetic
uuucaguaaauucuuaccguu

SEQ ID NO: 139 - RNA, 21 nt, Artificial
  synthetic
uucaguaaauucuuaccguca

SEQ ID NO: 140 - RNA, 21 nt, Artificial
  synthetic
ucaguaaauucuuaccgucaa

SEQ ID NO: 141 - RNA, 21 nt, Artificial
  synthetic
caguaaauucuuaccgucaaa

SEQ ID NO: 142 - RNA, 21 nt, Artificial
  synthetic
aguaaauucuuaccgucaaau

SEQ ID NO: 143 - RNA, 21 nt, Artificial
  synthetic
guaaauucuuaccgucaaacu

SEQ ID NO: 144 - RNA, 21 nt, Artificial
  synthetic
uaaauucuuaccgucaaacuu

SEQ ID NO: 145 - RNA, 21 nt, Artificial
  synthetic
aaauucuuaccgucaaacuga

SEQ ID NO: 146 - RNA, 21 nt, Artificial
  synthetic
aauucuuaccgucaaacugau

SEQ ID NO: 147 - RNA, 21 nt, Artificial
  synthetic
auucuuaccgucaaacugacu

SEQ ID NO: 148 - RNA, 21 nt, Artificial
  synthetic
uucuuaccgucaaacugacgu

SEQ ID NO: 149 - RNA, 21 nt, Artificial
  synthetic
ucuuaccgucaaacugacgga

SEQ ID NO: 150 - RNA, 21 nt, Artificial
  synthetic
cuuaccgucaaacugacggau

SEQ ID NO: 151 - RNA, 21 nt, Artificial
  synthetic
uuaccgucaaacugacggauu

SEQ ID NO: 152 - RNA, 21 nt, Artificial
  synthetic
uaccgucaaacugacggauua

SEQ ID NO: 153 - RNA, 21 nt, Artificial
  synthetic
accgucaaacugacggauuau

SEQ ID NO: 154 - RNA, 21 nt, Artificial
  synthetic
aacugacggauuauuauuuau

SEQ ID NO: 155 - RNA, 21 nt, Artificial
  synthetic
aguuugaugaggugaucacuu

SEQ ID NO: 156 - RNA, 21 nt, Artificial
  synthetic
acugucuacagugguucaacu

SEQ ID NO: 157 - RNA, 21 nt, Artificial
  synthetic
cugucuacagugguucaacuu

SEQ ID NO: 158 - RNA, 21 nt, Artificial
  synthetic
cuacagugguucaacuuuuaa

SEQ ID NO: 159 - RNA, 21 nt, Artificial
  synthetic
uacagugguucaacuuuuaau

SEQ ID NO: 160 - RNA, 21 nt, Artificial
  synthetic
ucaacuuuuaaguuaagggaa

SEQ ID NO: 161 - RNA, 21 nt, Artificial
  synthetic
aacuuuuaaguuaagggaaaa

SEQ ID NO: 162 - RNA, 21 nt, Artificial
  synthetic
aaaaacuuuuacuuuguagau

SEQ ID NO: 163 - RNA, 21 nt, Artificial
  synthetic
ccucagccuacgauuucuuuu

SEQ ID NO: 164 - RNA, 21 nt, Artificial
  synthetic
cucagccuacgauuucuuuug

SEQ ID NO: 165 - RNA, 21 nt, Artificial
  synthetic
ucagccuacgauuucuuuuga

SEQ ID NO: 166 - RNA, 21 nt, Artificial
  synthetic
gaggaugguucauauacuuau

SEQ ID NO: 167 - RNA, 21 nt, Artificial
  synthetic
aaugugaaguacaagugaaaa

SEQ ID NO: 168 - RNA, 21 nt, Artificial
  synthetic
aggaugguucauauacuuacu

SEQ ID NO: 169 - RNA, 21 nt, Artificial
  synthetic
gugaaguacaagugaaaaacu

SEQ ID NO: 170 - RNA, 21 nt, Artificial
  synthetic
aaggaguuuuuaaaacauaca

SEQ ID NO: 171 - RNA, 21 nt, Artificial
  synthetic
aggaguuuuuaaaacauacau

SEQ ID NO: 172 - RNA, 21 nt, Artificial
  synthetic
aaacauacaguccuaaguguu

SEQ ID NO: 173 - RNA, 21 nt, Artificial
  synthetic
aacauacaguccuaaguguga

SEQ ID NO: 174 - RNA, 21 nt, Artificial
  synthetic
acauacaguccuaagugugau

SEQ ID NO: 175 - RNA, 21 nt, Artificial
  synthetic
gcugcacaugagaaaaguaca

SEQ ID NO: 176 - RNA, 21 nt, Artificial
  synthetic
cugcacaugagaaaaguacau

SEQ ID NO: 177 - RNA, 21 nt, Artificial
  synthetic
auggagaguguuuuguucaaa

SEQ ID NO: 178 - RNA, 21 nt, Artificial
  synthetic
ggagaguguuuuguucaaauu

SEQ ID NO: 179 - RNA, 21 nt, Artificial
  synthetic
uuuguucaaaugcucagacuu

SEQ ID NO: 180 - RNA, 21 nt, Artificial
  synthetic
uguucaaaugcucagacuucu

SEQ ID NO: 181 - RNA, 21 nt, Artificial
  synthetic
guucaaaugcucagacuucgu

SEQ ID NO: 182 - RNA, 21 nt, Artificial
  synthetic
uucaaaugcucagacuucguu

SEQ ID NO: 183 - RNA, 21 nt, Artificial
  synthetic
ucaaaugcucagacuucguuu

SEQ ID NO: 184 - RNA, 21 nt, Artificial
  synthetic
caaaugcucagacuucguugu

SEQ ID NO: 185 - RNA, 21 nt, Artificial
  synthetic
aaaugcucagacuucguuguu

SEQ ID NO: 186 - RNA, 21 nt, Artificial
  synthetic
aaugcucagacuucguugugu

SEQ ID NO: 187 - RNA, 21 nt, Artificial
  synthetic
acauguuucgauauaaugaau

SEQ ID NO: 188 - RNA, 21 nt, Artificial
  synthetic
uuuaucuucauauacgguucu

SEQ ID NO: 189 - RNA, 21 nt, Artificial
  synthetic
agggacaacucagaagaauuu

SEQ ID NO: 190 - RNA, 21 nt, Artificial
  synthetic
gggacaacucagaagaauuuc

SEQ ID NO: 191 - RNA, 21 nt, Artificial
  synthetic
ggacaacucagaagaauuucu

SEQ ID NO: 192 - RNA, 21 nt, Artificial
  synthetic
gacaacucagaagaauuucuu

SEQ ID NO: 193 - RNA, 21 nt, Artificial
  synthetic
cuucucacacuucagauuuca

SEQ ID NO: 194 - RNA, 21 nt, Artificial
  synthetic
uucucacacuucagauuucaa

SEQ ID NO: 195 - RNA, 21 nt, Artificial
  synthetic
ucagaccaaagaguaguuaau

SEQ ID NO: 196 - RNA, 21 nt, Artificial
  synthetic
cagaccaaagaguaguuaauu

SEQ ID NO: 197 - RNA, 21 nt, Artificial
  synthetic
ugcuucucacacuucagauuu

SEQ ID NO: 198 - RNA, 21 nt, Artificial
  synthetic
gcuucucacacuucagauuuc

SEQ ID NO: 199 - RNA, 21 nt, Artificial
  synthetic
uagaauuuguaucccacaauu

SEQ ID NO: 200 - RNA, 21 nt, Artificial
  synthetic
agaauuuguaucccacaaucu

SEQ ID NO: 201 - RNA, 21 nt, Artificial
  synthetic
gaauuuguaucccacaauccu

SEQ ID NO: 202 - RNA, 21 nt, Artificial
  synthetic
gugaaacaucaccuagcuuuu

SEQ ID NO: 203 - RNA, 21 nt, Artificial
  synthetic
ugaaacaucaccuagcuuuuc

SEQ ID NO: 204 - RNA, 21 nt, Artificial
  synthetic
gaaacaucaccuagcuuuuca

SEQ ID NO: 205 - RNA, 21 nt, Artificial
  synthetic
aaacaucaccuagcuuuucaa

SEQ ID NO: 206 - RNA, 21 nt, Artificial
  synthetic
aacaucaccuagcuuuucaaa

SEQ ID NO: 207 - RNA, 21 nt, Artificial
  synthetic
acaucaccuagcuuuucaaaa

SEQ ID NO: 208 - RNA, 21 nt, Artificial
  synthetic
caucaccuagcuuuucaaaau

SEQ ID NO: 209 - RNA, 21 nt, Artificial
  synthetic
aucaccuagcuuuucaaaagu

SEQ ID NO: 210 - RNA, 21 nt, Artificial
  synthetic
ucaccuagcuuuucaaaagcu

SEQ ID NO: 211 - RNA, 21 nt, Artificial
  synthetic
caccuagcuuuucaaaagcuu

SEQ ID NO: 212 - RNA, 21 nt, Artificial
  synthetic
accuagcuuuucaaaagcuga

SEQ ID NO: 213 - RNA, 21 nt, Artificial
  synthetic
ccuagcuuuucaaaagcugau

SEQ ID NO: 214 - RNA, 21 nt, Artificial
  synthetic
ucugaaucuauggaucaacua

SEQ ID NO: 215 - RNA, 21 nt, Artificial
  synthetic
cugaaucuauggaucaacuau

SEQ ID NO: 216 - RNA, 21 nt, Artificial
  synthetic
caucugaaucuauggaucaau

SEQ ID NO: 217 - RNA, 21 nt, Artificial
  synthetic
aucugaaucuauggaucaacu

SEQ ID NO: 218 - RNA, 21 nt, Artificial
  synthetic
aucuauggaucaacuacuaau

SEQ ID NO: 219 - RNA, 21 nt, Artificial
  synthetic
ucuauggaucaacuacuaagu

SEQ ID NO: 220 - RNA, 21 nt, Artificial
  synthetic
cuauggaucaacuacuaagca

SEQ ID NO: 221 - RNA, 21 nt, Artificial
  synthetic
uauggaucaacuacuaagcaa

SEQ ID NO: 222 - RNA, 21 nt, Artificial
  synthetic
auggaucaacuacuaagcaaa

SEQ ID NO: 223 - RNA, 21 nt, Artificial
  synthetic
uggaucaacuacuaagcaaaa

SEQ ID NO: 224 - RNA, 21 nt, Artificial
  synthetic
ggaucaacuacuaagcaaaaa

SEQ ID NO: 225 - RNA, 21 nt, Artificial
  synthetic
gaucaacuacuaagcaaaaau

SEQ ID NO: 226 - RNA, 21 nt, Artificial
  synthetic
aaggagaaaagucacgagauu

SEQ ID NO: 227 - RNA, 21 nt, Artificial
  synthetic
ggaguucaacccucguucuuu

SEQ ID NO: 228 - RNA, 21 nt, Artificial
  synthetic
guucaacccucguucuuucuu

SEQ ID NO: 229 - RNA, 21 nt, Artificial
  synthetic
uucaacccucguucuuucucu

SEQ ID NO: 230 - RNA, 21 nt, Artificial
  synthetic
ucaacccucguucuuucucuu

SEQ ID NO: 231 - RNA, 21 nt, Artificial
  synthetic
caacccucguucuuucucuca

SEQ ID NO: 232 - RNA, 21 nt, Artificial
  synthetic
aacccucguucuuucucucau

SEQ ID NO: 233 - RNA, 21 nt, Artificial
  synthetic
cguucuuucucucagccaaau

SEQ ID NO: 234 - RNA, 21 nt, Artificial
  synthetic
guucuuucucucagccaaagu

SEQ ID NO: 235 - RNA, 21 nt, Artificial
  synthetic
aguccugucauacaagguaau

SEQ ID NO: 236 - RNA, 21 nt, Artificial
  synthetic
guccugucauacaagguaauu

SEQ ID NO: 237 - RNA, 21 nt, Artificial
  synthetic
ugucauacaagguaaugccau

SEQ ID NO: 238 - RNA, 21 nt, Artificial
  synthetic
gucauacaagguaaugccagu

SEQ ID NO: 239 - RNA, 21 nt, Artificial
  synthetic
ucuacuuugccauuuccaccu

SEQ ID NO: 240 - RNA, 21 nt, Artificial
  synthetic
aagcacagaaaacuagaacuu

SEQ ID NO: 241 - RNA, 21 nt, Artificial
  synthetic
gcacagaaaacuagaacuuca

SEQ ID NO: 242 - RNA, 21 nt, Artificial
  synthetic
acagaaaacuagaacuucauu

SEQ ID NO: 243 - RNA, 21 nt, Artificial
  synthetic
cagaaaacuagaacuucauuu

SEQ ID NO: 244 - RNA, 21 nt, Artificial
  synthetic
gaaacuggaaguuauuuauuu

SEQ ID NO: 245 - RNA, 21 nt, Artificial
  synthetic
agucaugaacacaucagcuau

SEQ ID NO: 246 - RNA, 21 nt, Artificial
  synthetic
gucaugaacacaucagcuagu

SEQ ID NO: 247 - RNA, 21 nt, Artificial
  synthetic
ugcuugcugaaacuggaaguu

SEQ ID NO: 248 - RNA, 21 nt, Artificial
  synthetic
cugaaacuggaaguuauuuau

SEQ ID NO: 249 - RNA, 21 nt, Artificial
  synthetic
ugaaacuggaaguuauuuauu

SEQ ID NO: 250 - RNA, 21 nt, Artificial
  synthetic
uugagagucaugaacacauca

SEQ ID NO: 251 - RNA, 21 nt, Artificial
  synthetic
augaacacaucagcuagcaau

SEQ ID NO: 252 - RNA, 21 nt, Artificial
  synthetic
agaaguaacaagagugauucu

SEQ ID NO: 253 - RNA, 21 nt, Artificial
  synthetic
ugaacacaucagcuagcaaca

SEQ ID NO: 254 - RNA, 21 nt, Artificial
  synthetic
aucagcuagcaacagaaguaa

SEQ ID NO: 255 - RNA, 21 nt, Artificial
  synthetic
cagcuagcaacagaaguaaca

SEQ ID NO: 256 - RNA, 21 nt, Artificial
  synthetic
cuagcaacagaaguaacaaga

SEQ ID NO: 257 - RNA, 21 nt, Artificial
  synthetic
uagcaacagaaguaacaagau

SEQ ID NO: 258 - RNA, 21 nt, Artificial
  synthetic
cuugcugcuauuaccgcuuua

SEQ ID NO: 259 - RNA, 21 nt, Artificial
  synthetic
gcugcuauuaccgcuuuaaaa

SEQ ID NO: 260 - RNA, 21 nt, Artificial
  synthetic
cccuuuuacuaaacuugacau

SEQ ID NO: 261 - RNA, 21 nt, Artificial
  synthetic
cuuuuacuaaacuugacagaa

SEQ ID NO: 262 - RNA, 21 nt, Artificial
  synthetic
uuuuacuaaacuugacagaau

SEQ ID NO: 263 - RNA, 21 nt, Artificial
  synthetic
uacuaaacuugacagaaguuu

SEQ ID NO: 264 - RNA, 21 nt, Artificial
  synthetic
cuaaacuugacagaaguucau

SEQ ID NO: 265 - RNA, 21 nt, Artificial
  synthetic
acuugacagaaguucaguaaa

SEQ ID NO: 266 - RNA, 21 nt, Artificial
  synthetic
ugacagaaguucaguaaauuu

SEQ ID NO: 267 - RNA, 21 nt, Artificial
  synthetic
acagaaguucaguaaauucuu

SEQ ID NO: 268 - RNA, 21 nt, Artificial
  synthetic
cagaaguucaguaaauucuua

SEQ ID NO: 269 - RNA, 21 nt, Artificial
  synthetic
agaaguucaguaaauucuuau

SEQ ID NO: 270 - RNA, 21 nt, Artificial
  synthetic
ccaaacugacggauuauuauu

SEQ ID NO: 271 - RNA, 21 nt, Artificial
  synthetic
aaaacuuuuacuuuguagaua

SEQ ID NO: 272 - RNA, 21 nt, Artificial
  synthetic
guuaagggaaaacuuuuacuu

SEQ ID NO: 273 - RNA, 21 nt, Artificial
  synthetic
uuaagggaaaacuuuuacuuu

SEQ ID NO: 274 - RNA, 21 nt, Artificial
  synthetic
uaagggaaaacuuuuacuuug

SEQ ID NO: 275 - RNA, 21 nt, Artificial
  synthetic
agggaaaacuuuuacuuugua

SEQ ID NO: 276 - RNA, 21 nt, Artificial
  synthetic
gggaaaacuuuuacuuuguau

SEQ ID NO: 277 - RNA, 21 nt, Artificial
  synthetic
gaaaacuuuuacuuuguagau

SEQ ID NO: 278 - DNA, 23 bp, Artificial
  synthetic
aacucutuaccggaagucggagg

SEQ ID NO: 279 - DNA, 23 bp, Artificial
  synthetic
agacuctuuaccggaagucggag

SEQ ID NO: 280 - RNA, 23 nt, Artificial
  synthetic
aggacucuuuaccggaagucgga

SEQ ID NO: 281 - RNA, 23 nt, Artificial
  synthetic
uuuucacuuguacuucacauuug

SEQ ID NO: 282 - RNA, 23 nt, Artificial
  synthetic
uuuuucacuuguacuucacauuu

SEQ ID NO: 283 - DNA, 23 bp, Artificial
  synthetic
agauuctguacuuuucucaugug

SEQ ID NO: 284 - RNA, 23 nt, Artificial
  synthetic
aaaucugaagugugagaagugga

SEQ ID NO: 285 - DNA, 23 bp, Artificial
  synthetic
gaaauctgaagugugagaagugg

SEQ ID NO: 286 - RNA, 23 nt, Artificial
  synthetic
ugaaaucugaagugugagaagug

SEQ ID NO: 287 - DNA, 23 bp, Artificial
  synthetic
uugaaatcugaagugugagaagu

SEQ ID NO: 288 - RNA, 23 nt, Artificial
  synthetic
auugaaaucugaagugugagaag

SEQ ID NO: 289 - RNA, 23 nt, Artificial
  synthetic
aguugaaaucugaagugugagaa

SEQ ID NO: 290 - RNA, 23 nt, Artificial
  synthetic
agguugaaaucugaagugugaga

SEQ ID NO: 291 - RNA, 23 nt, Artificial
  synthetic
aggguugaaaucugaagugugag

SEQ ID NO: 292 - RNA, 23 nt, Artificial
  synthetic
auucggguugaaaucugaagugu

SEQ ID NO: 293 - DNA, 23 bp, Artificial
  synthetic
auuaactacucuuuggucugaac

SEQ ID NO: 294 - RNA, 23 nt, Artificial
  synthetic
aauuaacuacucuuuggucugaa

SEQ ID NO: 295 - DNA, 23 bp, Artificial
  synthetic
augcgutuaggcauaguagagac

SEQ ID NO: 296 - DNA, 23 bp, Artificial
  synthetic
aaugcgtuuaggcauaguagaga

SEQ ID NO: 297 - RNA, 23 nt, Artificial
  synthetic
aacaugcguuuaggcauaguaga

SEQ ID NO: 298 - RNA, 23 nt, Artificial
  synthetic
auugauccauagauucagaagua

SEQ ID NO: 299 - DNA, 23 bp, Artificial
  synthetic
aguugatccauagauucagaagu

SEQ ID NO: 300 - RNA, 23 nt, Artificial
  synthetic
uaguugauccauagauucagaag

SEQ ID NO: 301 - RNA, 23 nt, Artificial
  synthetic
auaguugauccauagauucagaa

SEQ ID NO: 302 - DNA, 23 bp, Artificial
  synthetic
aguagutgauccauagauucaga

SEQ ID NO: 303 - DNA, 23 bp, Artificial
  synthetic
uaguagtugauccauagauucag

SEQ ID NO: 304 - RNA, 23 nt, Artificial
  synthetic
uuaguaguugauccauagauuca

SEQ ID NO: 305 - RNA, 23 nt, Artificial
  synthetic
uuuaguaguugauccauagauuc

SEQ ID NO: 306 - DNA, 23 bp, Artificial
  synthetic
acgucatagguauuggguauaaa

SEQ ID NO: 307 - RNA, 23 nt, Artificial
  synthetic
uuugguacugcucuauaugucuu

SEQ ID NO: 308 - RNA, 23 nt, Artificial
  synthetic
auauuugguacugcucuauaugu

SEQ ID NO: 309 - DNA, 23 bp, Artificial
  synthetic
aauauutgguacugcucuauaug

SEQ ID NO: 310 - DNA, 23 bp, Artificial
  synthetic
acauautugguacugcucuauau

SEQ ID NO: 311 - RNA, 23 nt, Artificial
  synthetic
aggcauauuugguacugcucuau

SEQ ID NO: 312 - DNA, 23 bp, Artificial
  synthetic
auuguatgguaauuugggacaug

SEQ ID NO: 313 - DNA, 23 bp, Artificial
  synthetic
uuguugtaugguaauuugggaca

SEQ ID NO: 314 - DNA, 23 bp, Artificial
  synthetic
acaaagtagaaagaagggcuugu

SEQ ID NO: 315 - RNA, 23 nt, Artificial
  synthetic
auggcaaaguagaaagaagggcu

SEQ ID NO: 316 - RNA, 23 nt, Artificial
  synthetic
aauggcaaaguagaaagaagggc

SEQ ID NO: 317 - RNA, 23 nt, Artificial
  synthetic
aaauggcaaaguagaaagaaggg

SEQ ID NO: 318 - RNA, 23 nt, Artificial
  synthetic
gaaauggcaaaguagaaagaagg

SEQ ID NO: 319 - RNA, 23 nt, Artificial
  synthetic
agaaauggcaaaguagaaagaag

SEQ ID NO: 320 - DNA, 23 bp, Artificial
  synthetic
uggaaatggcaaaguagaaagaa

SEQ ID NO: 321 - RNA, 23 nt, Artificial
  synthetic
auggaaauggcaaaguagaaaga

SEQ ID NO: 322 - RNA, 23 nt, Artificial
  synthetic
aguggaaauggcaaaguagaaag

SEQ ID NO: 323 - DNA, 23 bp, Artificial
  synthetic
aaccautccugacuguacaugag

SEQ ID NO: 324 - DNA, 23 bp, Artificial
  synthetic
aaaccatuccugacuguacauga

SEQ ID NO: 325 - RNA, 23 nt, Artificial
  synthetic
agaaccauuccugacuguacaug

SEQ ID NO: 326 - RNA, 23 nt, Artificial
  synthetic
aaugagaaggaaccauuccugac

SEQ ID NO: 327 - RNA, 23 nt, Artificial
  synthetic
uuggaugagaaggaaccauuccu

SEQ ID NO: 328 - RNA, 23 nt, Artificial
  synthetic
aguuggaugagaaggaaccauuc

SEQ ID NO: 329 - RNA, 23 nt, Artificial
  synthetic
aaguuggaugagaaggaaccauu

SEQ ID NO: 330 - DNA, 23 bp, Artificial
  synthetic
agcagutggaugagaaggaacca

SEQ ID NO: 331 - RNA, 23 nt, Artificial
  synthetic
aauuagcaucauuggcgcauggg

SEQ ID NO: 332 - DNA, 23 bp, Artificial
  synthetic
agucautagcaucauuggcgcau

SEQ ID NO: 333 - RNA, 23 nt, Artificial
  synthetic
aucgucauuagcaucauuggcgc

SEQ ID NO: 334 - RNA, 23 nt, Artificial
  synthetic
ugucgucauuagcaucauuggcg

SEQ ID NO: 335 - RNA, 23 nt, Artificial
  synthetic
augugucgucauuagcaucauug

SEQ ID NO: 336 - DNA, 23 bp, Artificial
  synthetic
acugugtcgucauuagcaucauu

SEQ ID NO: 337 - RNA, 23 nt, Artificial
  synthetic
agcuguagugcacuuugagcgag

SEQ ID NO: 338 - RNA, 23 nt, Artificial
  synthetic
uugucgagacuggaaugggcugu

SEQ ID NO: 339 - RNA, 23 nt, Artificial
  synthetic
uguugucgagacuggaaugggcu

SEQ ID NO: 340 - RNA, 23 nt, Artificial
  synthetic
uuacaacugcuguuggugguggg

SEQ ID NO: 341 - RNA, 23 nt, Artificial
  synthetic
auuacaacugcuguugguggugg

SEQ ID NO: 342 - RNA, 23 nt, Artificial
  synthetic
acuuacaacugcuguugguggug

SEQ ID NO: 343 - RNA, 23 nt, Artificial
  synthetic
agccuuacaacugcuguuggugg

SEQ ID NO: 344 - DNA, 23 bp, Artificial
  synthetic
acagcctuacaacugcuguuggu

SEQ ID NO: 345 - DNA, 23 bp, Artificial
  synthetic
aguuggtagaagcaguagaaggg

SEQ ID NO: 346 - RNA, 23 nt, Artificial
  synthetic
acaguugguagaagcaguagaag

SEQ ID NO: 347 - DNA, 23 bp, Artificial
  synthetic
uccagutgguagaagcaguagaa

SEQ ID NO: 348 - RNA, 23 nt, Artificial
  synthetic
acuuccaguugguagaagcagua

SEQ ID NO: 349 - RNA, 23 nt, Artificial
  synthetic
aguuuucugugcuuccaguuggu

SEQ ID NO: 350 - RNA, 23 nt, Artificial
  synthetic
uuggauguuacaagaaaucaaca

SEQ ID NO: 351 - RNA, 23 nt, Artificial
  synthetic
auauuggauguuacaagaaauca

SEQ ID NO: 352 - DNA, 23 bp, Artificial
  synthetic
uccuautggauguuacaagaaau

SEQ ID NO: 353 - DNA, 23 bp, Artificial
  synthetic
uuccuatuggauguuacaagaaa

SEQ ID NO: 354 - RNA, 23 nt, Artificial
  synthetic
acauuccuauuggauguuacaag

SEQ ID NO: 355 - DNA, 23 bp, Artificial
  synthetic
uagcautccuauuggauguuaca

SEQ ID NO: 356 - DNA, 23 bp, Artificial
  synthetic
uuagcatuccuauuggauguuac

SEQ ID NO: 357 - RNA, 23 nt, Artificial
  synthetic
auuagcauuccuauuggauguua

SEQ ID NO: 358 - RNA, 23 nt, Artificial
  synthetic
uguuagcauuccuauuggauguu

SEQ ID NO: 359 - RNA, 23 nt, Artificial
  synthetic
ugaacuguuagcauuccuauugg

SEQ ID NO: 360 - DNA, 23 bp, Artificial
  synthetic
augaactguuagcauuccuauug

SEQ ID NO: 361 - RNA, 23 nt, Artificial
  synthetic
agugaacuguuagcauuccuauu

SEQ ID NO: 362 - RNA, 23 nt, Artificial
  synthetic
aagugaacuguuagcauuccuau

SEQ ID NO: 363 - RNA, 23 nt, Artificial
  synthetic
aaagugaacuguuagcauuccua

SEQ ID NO: 364 - RNA, 23 nt, Artificial
  synthetic
acaagugaacuguuagcauuccu

SEQ ID NO: 365 - RNA, 23 nt, Artificial
  synthetic
aacugcaagugaacuguuagcau

SEQ ID NO: 366 - RNA, 23 nt, Artificial
  synthetic
ucuuccacugcaagugaacuguu

SEQ ID NO: 367 - DNA, 23 bp, Artificial
  synthetic
acuaaatgccucuacucggucca

SEQ ID NO: 368 - RNA, 23 nt, Artificial
  synthetic
uccuaaaugccucuacucggucc

SEQ ID NO: 369 - RNA, 23 nt, Artificial
  synthetic
auauggaauuauggaauagcccc

SEQ ID NO: 370 - RNA, 23 nt, Artificial
  synthetic
aaauaacuuccaguuucggcaag

SEQ ID NO: 371 - RNA, 23 nt, Artificial
  synthetic
auaaauaacuuccaguuucggca

SEQ ID NO: 372 - DNA, 23 bp, Artificial
  synthetic
aauaaataacuuccaguuucggc

SEQ ID NO: 373 - RNA, 23 nt, Artificial
  synthetic
aaauaaauaacuuccaguuucgg

SEQ ID NO: 374 - RNA, 23 nt, Artificial
  synthetic
aaaauaaauaacuuccaguuucg

SEQ ID NO: 375 - DNA, 23 bp, Artificial
  synthetic
aaugactuucaaggguuauuaaa

SEQ ID NO: 376 - RNA, 23 nt, Artificial
  synthetic
ucaugacuuucaaggguuauuaa

SEQ ID NO: 377 - DNA, 23 bp, Artificial
  synthetic
uguucatgacuuucaaggguuau

SEQ ID NO: 378 - DNA, 23 bp, Artificial
  synthetic
aaugugtucaugacuuucaaggg

SEQ ID NO: 379 - RNA, 23 nt, Artificial
  synthetic
auagcugauguguucaugacuuu

SEQ ID NO: 380 - DNA, 23 bp, Artificial
  synthetic
acuagctgauguguucaugacuu

SEQ ID NO: 381 - RNA, 23 nt, Artificial
  synthetic
ugcuagcugauguguucaugacu

SEQ ID NO: 382 - RNA, 23 nt, Artificial
  synthetic
uugcuagcugauguguucaugac

SEQ ID NO: 383 - RNA, 23 nt, Artificial
  synthetic
uuugcuagcugauguguucauga

SEQ ID NO: 384 - RNA, 23 nt, Artificial
  synthetic
uuugcuagcugauguguucauga

SEQ ID NO: 385 - DNA, 23 bp, Artificial
  synthetic
uuuugctagcugauguguucaug

SEQ ID NO: 386 - RNA, 23 nt, Artificial
  synthetic
auuuugcuagcugauguguucau

SEQ ID NO: 387 - RNA, 23 nt, Artificial
  synthetic
ucuuuugcuagcugauguguuca

SEQ ID NO: 388 - DNA, 23 bp, Artificial
  synthetic
uacuuctuuugcuagcugaugug

SEQ ID NO: 389 - DNA, 23 bp, Artificial
  synthetic
ucuugutacuucuuuugcuagcu

SEQ ID NO: 390 - RNA, 23 nt, Artificial
  synthetic
agcaagaaucacucuuguuacuu

SEQ ID NO: 391 - RNA, 23 nt, Artificial
  synthetic
aagcaagaaucacucuuguuacu

SEQ ID NO: 392 - RNA, 23 nt, Artificial
  synthetic
acagcaagaaucacucuuguuac

SEQ ID NO: 393 - RNA, 23 nt, Artificial
  synthetic
aauagcagcaagaaucacucuug

SEQ ID NO: 394 - RNA, 23 nt, Artificial
  synthetic
uaauagcagcaagaaucacucuu

SEQ ID NO: 395 - RNA, 23 nt, Artificial
  synthetic
aguaauagcagcaagaaucacuc

SEQ ID NO: 396 - RNA, 23 nt, Artificial
  synthetic
uuuaguaaaagggcguuccaagu

SEQ ID NO: 397 - DNA, 23 bp, Artificial
  synthetic
auuuagtaaaagggcguuccaag

SEQ ID NO: 398 - RNA, 23 nt, Artificial
  synthetic
aaguuuaguaaaagggcguucca

SEQ ID NO: 399 - DNA, 23 bp, Artificial
  synthetic
aaaguutaguaaaagggcguucc

SEQ ID NO: 400 - DNA, 23 bp, Artificial
  synthetic
ucaagutuaguaaaagggcguuc

SEQ ID NO: 401 - DNA, 23 bp, Artificial
  synthetic
aucaagtuuaguaaaagggcguu

SEQ ID NO: 402 - RNA, 23 nt, Artificial
  synthetic
acgguaagaauuuacugaaacuu

SEQ ID NO: 403 - RNA, 23 nt, Artificial
  synthetic
aacgguaagaauuuacugaaacu

SEQ ID NO: 404 - DNA, 23 bp, Artificial
  synthetic
ugacggtaagaauuuacugaaac

SEQ ID NO: 405 - RNA, 23 nt, Artificial
  synthetic
uugacgguaagaauuuacugaaa

SEQ ID NO: 406 - RNA, 23 nt, Artificial
  synthetic
uuugacgguaagaauuuacugaa

SEQ ID NO: 407 - RNA, 23 nt, Artificial
  synthetic
auuugacgguaagaauuuacuga

SEQ ID NO: 408 - RNA, 23 nt, Artificial
  synthetic
aguuugacgguaagaauuuacug

SEQ ID NO: 409 - RNA, 23 nt, Artificial
  synthetic
aaguuugacgguaagaauuuacu

SEQ ID NO: 410 - DNA, 23 bp, Artificial
  synthetic
ucaguutgacgguaagaauuuac

SEQ ID NO: 411 - DNA, 23 bp, Artificial
  synthetic
aucagutugacgguaagaauuua

SEQ ID NO: 412 - DNA, 23 bp, Artificial
  synthetic
agucagtuugacgguaagaauuu

SEQ ID NO: 413 - RNA, 23 nt, Artificial
  synthetic
acgucaguuugacgguaagaauu

SEQ ID NO: 414 - RNA, 23 nt, Artificial
  synthetic
uccgucaguuugacgguaagaau

SEQ ID NO: 415 - RNA, 23 nt, Artificial
  synthetic
auccgucaguuugacgguaagaa

SEQ ID NO: 416 - DNA, 23 bp, Artificial
  synthetic
aauccgtcaguuugacgguaaga

SEQ ID NO: 417 - RNA, 23 nt, Artificial
  synthetic
uaauccgucaguuugacgguaag

SEQ ID NO: 418 - RNA, 23 nt, Artificial
  synthetic
auaauccgucaguuugacgguaa

SEQ ID NO: 419 - RNA, 23 nt, Artificial
  synthetic
auaaauaauaauccgucaguuug

SEQ ID NO: 420 - DNA, 23 bp, Artificial
  synthetic
aagugatcaccucaucaaacuug

SEQ ID NO: 421 - RNA, 23 nt, Artificial
  synthetic
aguugaaccacuguagacaguga

SEQ ID NO: 422 - RNA, 23 nt, Artificial
  synthetic
aaguugaaccacuguagacagug

SEQ ID NO: 423 - RNA, 23 nt, Artificial
  synthetic
uuaaaaguugaaccacuguagac

SEQ ID NO: 424 - RNA, 23 nt, Artificial
  synthetic
auuaaaaguugaaccacuguaga

SEQ ID NO: 425 - DNA, 23 bp, Artificial
  synthetic
uucccutaacuuaaaaguugaac

SEQ ID NO: 426 - RNA, 23 nt, Artificial
  synthetic
uuuucccuuaacuuaaaaguuga

SEQ ID NO: 427 - RNA, 23 nt, Artificial
  synthetic
aucuacaaaguaaaaguuuuucc

SEQ ID NO: 428 - RNA, 23 nt, Artificial
  synthetic
aaaagaaaucguaggcugaggca

SEQ ID NO: 429 - RNA, 23 nt, Artificial
  synthetic
caaaagaaaucguaggcugaggc

SEQ ID NO: 430 - RNA, 23 nt, Artificial
  synthetic
ucaaaagaaaucguaggcugagg

SEQ ID NO: 431 - RNA, 23 nt, Artificial
  synthetic
auaaguauaugaaccauccucac

SEQ ID NO: 432 - RNA, 23 nt, Artificial
  synthetic
uuuucacuuguacuucacauuuc

SEQ ID NO: 433 - DNA, 23 bp, Artificial
  synthetic
aguaagtauaugaaccauccuca

SEQ ID NO: 434 - DNA, 23 bp, Artificial
  synthetic
aguuuutcacuuguacuucacau

SEQ ID NO: 435 - DNA, 23 bp, Artificial
  synthetic
uguaugtuuuaaaaacuccuuca

SEQ ID NO: 436 - RNA, 23 nt, Artificial
  synthetic
auguauguuuuaaaaacuccuuc

SEQ ID NO: 437 - DNA, 23 bp, Artificial
  synthetic
aacacutaggacuguauguuuua

SEQ ID NO: 438 - DNA, 23 bp, Artificial
  synthetic
ucacactuaggacuguauguuuu

SEQ ID NO: 439 - RNA, 23 nt, Artificial
  synthetic
aucacacuuaggacuguauguuu

SEQ ID NO: 440 - DNA, 23 bp, Artificial
  synthetic
uguacutuucucaugugcagcau

SEQ ID NO: 441 - DNA, 23 bp, Artificial
  synthetic
auguactuuucucaugugcagca

SEQ ID NO: 442 - RNA, 23 nt, Artificial
  synthetic
uuugaacaaaacacucuccauua

SEQ ID NO: 443 - RNA, 23 nt, Artificial
  synthetic
aauuugaacaaaacacucuccau

SEQ ID NO: 444 - RNA, 23 nt, Artificial
  synthetic
aagucugagcauuugaacaaaac

SEQ ID NO: 445 - RNA, 23 nt, Artificial
  synthetic
agaagucugagcauuugaacaaa

SEQ ID NO: 446 - DNA, 23 bp, Artificial
  synthetic
acgaagtcugagcauuugaacaa

SEQ ID NO: 447 - RNA, 23 nt, Artificial
  synthetic
aacgaagucugagcauuugaaca

SEQ ID NO: 448 - RNA, 23 nt, Artificial
  synthetic
aaacgaagucugagcauuugaac

SEQ ID NO: 449 - RNA, 23 nt, Artificial
  synthetic
acaacgaagucugagcauuugaa

SEQ ID NO: 450 - RNA, 23 nt, Artificial
  synthetic
aacaacgaagucugagcauuuga

SEQ ID NO: 451 - RNA, 23 nt, Artificial
  synthetic
acacaacgaagucugagcauuug

SEQ ID NO: 452 - DNA, 23 bp, Artificial
  synthetic
auucautauaucgaaacauguca

SEQ ID NO: 453 - RNA, 23 nt, Artificial
  synthetic
agaaccguauaugaagauaaacu

SEQ ID NO: 454 - DNA, 23 bp, Artificial
  synthetic
aaauuctucugaguugucccuuu

SEQ ID NO: 455 - RNA, 23 nt, Artificial
  synthetic
gaaauucuucugaguugucccuu

SEQ ID NO: 456 - DNA, 23 bp, Artificial
  synthetic
agaaautcuucugaguugucccu

SEQ ID NO: 457 - DNA, 23 bp, Artificial
  synthetic
aagaaatucuucugaguuguccc

SEQ ID NO: 458 - RNA, 23 nt, Artificial
  synthetic
ugaaaucugaagugugagaagca

SEQ ID NO: 459 - DNA, 23 bp, Artificial
  synthetic
uugaaatcugaagugugagaagc

SEQ ID NO: 460 - DNA, 23 bp, Artificial
  synthetic
auuaactacucuuuggucugagc

SEQ ID NO: 461 - RNA, 23 nt, Artificial
  synthetic
aauuaacuacucuuuggucugag

SEQ ID NO: 462 - RNA, 23 nt, Artificial
  synthetic
aaaucugaagugugagaagcagc

SEQ ID NO: 463 - DNA, 23 bp, Artificial
  synthetic
gaaauctgaagugugagaagcag

SEQ ID NO: 464 - RNA, 23 nt, Artificial
  synthetic
aauugugggauacaaauucuagg

SEQ ID NO: 465 - DNA, 23 bp, Artificial
  synthetic
agauugtgggauacaaauucuag

SEQ ID NO: 466 - RNA, 23 nt, Artificial
  synthetic
aggauugugggauacaaauucua

SEQ ID NO: 467 - DNA, 23 bp, Artificial
  synthetic
aaaagctaggugauguuucacuu

SEQ ID NO: 468 - RNA, 23 nt, Artificial
  synthetic
gaaaagcuaggugauguuucacu

SEQ ID NO: 469 - RNA, 23 nt, Artificial
  synthetic
ugaaaagcuaggugauguuucac

SEQ ID NO: 470 - RNA, 23 nt, Artificial
  synthetic
uugaaaagcuaggugauguuuca

SEQ ID NO: 471 - RNA, 23 nt, Artificial
  synthetic
uuugaaaagcuaggugauguuuc

SEQ ID NO: 472 - RNA, 23 nt, Artificial
  synthetic
uuuugaaaagcuaggugauguuu

SEQ ID NO: 473 - RNA, 23 nt, Artificial
  synthetic
auuuugaaaagcuaggugauguu

SEQ ID NO: 474 - RNA, 23 nt, Artificial
  synthetic
acuuuugaaaagcuaggugaugu

SEQ ID NO: 475 - DNA, 23 bp, Artificial
  synthetic
agcuuutgaaaagcuaggugaug

SEQ ID NO: 476 - DNA, 23 bp, Artificial
  synthetic
aagcuutugaaaagcuaggugau

SEQ ID NO: 477 - DNA, 23 bp, Artificial
  synthetic
ucagcutuugaaaagcuagguga

SEQ ID NO: 478 - DNA, 23 bp, Artificial
  synthetic
aucagctuuugaaaagcuaggug

SEQ ID NO: 479 - RNA, 23 nt, Artificial
  synthetic
uaguugauccauagauucagaug

SEQ ID NO: 480 - RNA, 23 nt, Artificial
  synthetic
auaguugauccauagauucagau

SEQ ID NO: 481 - RNA, 23 nt, Artificial
  synthetic
auugauccauagauucagaugua

SEQ ID NO: 482 - DNA, 23 bp, Artificial
  synthetic
aguugatccauagauucagaugu

SEQ ID NO: 483 - RNA, 23 nt, Artificial
  synthetic
auuaguaguugauccauagauuc

SEQ ID NO: 484 - DNA, 23 bp, Artificial
  synthetic
acuuagtaguugauccauagauu

SEQ ID NO: 485 - RNA, 23 nt, Artificial
  synthetic
ugcuuaguaguugauccauagau

SEQ ID NO: 486 - RNA, 23 nt, Artificial
  synthetic
uugcuuaguaguugauccauaga

SEQ ID NO: 487 - DNA, 23 bp, Artificial
  synthetic
uuugcutaguaguugauccauag

SEQ ID NO: 488 - DNA, 23 bp, Artificial
  synthetic
uuuugctuaguaguugauccaua

SEQ ID NO: 489 - RNA, 23 nt, Artificial
  synthetic
uuuuugcuuaguaguugauccau

SEQ ID NO: 490 - RNA, 23 nt, Artificial
  synthetic
auuuuugcuuaguaguugaucca

SEQ ID NO: 491 - RNA, 23 nt, Artificial
  synthetic
aaucucgugacuuuucuccuucu

SEQ ID NO: 492 - RNA, 23 nt, Artificial
  synthetic
aaagaacgaggguugaacuccuu

SEQ ID NO: 493 - RNA, 23 nt, Artificial
  synthetic
aagaaagaacgaggguugaacuc

SEQ ID NO: 494 - RNA, 23 nt, Artificial
  synthetic
agagaaagaacgaggguugaacu

SEQ ID NO: 495 - RNA, 23 nt, Artificial
  synthetic
aagagaaagaacgaggguugaac

SEQ ID NO: 496 - RNA, 23 nt, Artificial
  synthetic
ugagagaaagaacgaggguugaa

SEQ ID NO: 497 - RNA, 23 nt, Artificial
  synthetic
augagagaaagaacgaggguuga

SEQ ID NO: 498 - RNA, 23 nt, Artificial
  synthetic
auuuggcugagagaaagaacgag

SEQ ID NO: 499 - RNA, 23 nt, Artificial
  synthetic
acuuuggcugagagaaagaacga

SEQ ID NO: 500 - DNA, 23 bp, Artificial
  synthetic
auuacctuguaugacaggacugu

SEQ ID NO: 501 - RNA, 23 nt, Artificial
  synthetic
aauuaccuuguaugacaggacug

SEQ ID NO: 502 - DNA, 23 bp, Artificial
  synthetic
auggcatuaccuuguaugacagg

SEQ ID NO: 503 - RNA, 23 nt, Artificial
  synthetic
acuggcauuaccuuguaugacag

SEQ ID NO: 504 - RNA, 23 nt, Artificial
  synthetic
agguggaaauggcaaaguagaaa

SEQ ID NO: 505 - DNA, 23 bp, Artificial
  synthetic
aaguuctaguuuucugugcuucc

SEQ ID NO: 506 - DNA, 23 bp, Artificial
  synthetic
ugaagutcuaguuuucugugcuu

SEQ ID NO: 507 - RNA, 23 nt, Artificial
  synthetic
aaugaaguucuaguuuucugugc

SEQ ID NO: 508 - RNA, 23 nt, Artificial
  synthetic
aaaugaaguucuaguuuucugug

SEQ ID NO: 509 - RNA, 23 nt, Artificial
  synthetic
aaauaaauaacuuccaguuucag

SEQ ID NO: 510 - RNA, 23 nt, Artificial
  synthetic
auagcugauguguucaugacucu

SEQ ID NO: 511 - DNA, 23 bp, Artificial
  synthetic
acuagctgauguguucaugacuc

SEQ ID NO: 512 - RNA, 23 nt, Artificial
  synthetic
aacuuccaguuucagcaagcaga

SEQ ID NO: 513 - RNA, 23 nt, Artificial
  synthetic
auaaauaacuuccaguuucagca

SEQ ID NO: 514 - DNA, 23 bp, Artificial
  synthetic
aauaaataacuuccaguuucagc

SEQ ID NO: 515 - RNA, 23 nt, Artificial
  synthetic
ugauguguucaugacucucaagg

SEQ ID NO: 516 - RNA, 23 nt, Artificial
  synthetic
auugcuagcugauguguucauga

SEQ ID NO: 517 - RNA, 23 nt, Artificial
  synthetic
agaaucacucuuguuacuucugu

SEQ ID NO: 518 - DNA, 23 bp, Artificial
  synthetic
uguugctagcugauguguucaug

SEQ ID NO: 519 - RNA, 23 nt, Artificial
  synthetic
uuacuucuguugcuagcugaugu

SEQ ID NO: 520 - DNA, 23 bp, Artificial
  synthetic
uguuactucuguugcuagcugau

SEQ ID NO: 521 - DNA, 23 bp, Artificial
  synthetic
ucuugutacuucuguugcuagcu

SEQ ID NO: 522 - DNA, 23 bp, Artificial
  synthetic
aucuugtuacuucuguugcuagc

SEQ ID NO: 523 - RNA, 23 nt, Artificial
  synthetic
uaaagcgguaauagcagcaagaa

SEQ ID NO: 524 - RNA, 23 nt, Artificial
  synthetic
uuuuaaagcgguaauagcagcaa

SEQ ID NO: 525 - RNA, 23 nt, Artificial
  synthetic
augucaaguuuaguaaaagggcg

SEQ ID NO: 526 - RNA, 23 nt, Artificial
  synthetic
uucugucaaguuuaguaaaaggg

SEQ ID NO: 527 - DNA, 23 bp, Artificial
  synthetic
auucugtcaaguuuaguaaaagg

SEQ ID NO: 528 - RNA, 23 nt, Artificial
  synthetic
aaacuucugucaaguuuaguaaa

SEQ ID NO: 529 - DNA, 23 bp, Artificial
  synthetic
augaactucugucaaguuuagua

SEQ ID NO: 530 - RNA, 23 nt, Artificial
  synthetic
uuuacugaacuucugucaaguuu

SEQ ID NO: 531 - RNA, 23 nt, Artificial
  synthetic
aaauuuacugaacuucugucaag

SEQ ID NO: 532 - DNA, 23 bp, Artificial
  synthetic
aagaautuacugaacuucuguca

SEQ ID NO: 533 - DNA, 23 bp, Artificial
  synthetic
uaagaatuuacugaacuucuguc

SEQ ID NO: 534 - RNA, 23 nt, Artificial
  synthetic
auaagaauuuacugaacuucugu

SEQ ID NO: 535 - RNA, 23 nt, Artificial
  synthetic
aauaauaauccgucaguuuggcg

SEQ ID NO: 536 - RNA, 23 nt, Artificial
  synthetic
uaucuacaaaguaaaaguuuucc

SEQ ID NO: 537 - RNA, 23 nt, Artificial
  synthetic
aaguaaaaguuuucccuuaacuu

SEQ ID NO: 538 - RNA, 23 nt, Artificial
  synthetic
aaaguaaaaguuuucccuuaacu

SEQ ID NO: 539 - RNA, 23 nt, Artificial
  synthetic
caaaguaaaaguuuucccuuaac

SEQ ID NO: 540 - RNA, 23 nt, Artificial
  synthetic
uacaaaguaaaaguuuucccuua

SEQ ID NO: 541 - RNA, 23 nt, Artificial
  synthetic
auacaaaguaaaaguuuucccuu

SEQ ID NO: 542 - RNA, 23 nt, Artificial
  synthetic
aucuacaaaguaaaaguuuuccc

SEQ ID NO: 543 - RNA, 23 nt, Artificial
  synthetic
ccuccgacuuccgguaaagaguc

SEQ ID NO: 544 - RNA, 23 nt, Artificial
  synthetic
cuccgacuuccgguaaagagucc

SEQ ID NO: 545 - RNA, 23 nt, Artificial
  synthetic
uccgacuuccgguaaagaguccc

SEQ ID NO: 546 - RNA, 23 nt, Artificial
  synthetic
caaaugugaaguacaagugaaaa

SEQ ID NO: 547 - RNA, 23 nt, Artificial
  synthetic
aaaugugaaguacaagugaaaaa

SEQ ID NO: 548 - RNA, 23 nt, Artificial
  synthetic
cacaugagaaaaguacagaaucc

SEQ ID NO: 549 - RNA, 23 nt, Artificial
  synthetic
uccacuucucacacuucagauuu

SEQ ID NO: 550 - RNA, 23 nt, Artificial
  synthetic
ccacuucucacacuucagauuuc

SEQ ID NO: 551 - RNA, 23 nt, Artificial
  synthetic
cacuucucacacuucagauuuca

SEQ ID NO: 552 - RNA, 23 nt, Artificial
  synthetic
acuucucacacuucagauuucaa

SEQ ID NO: 553 - RNA, 23 nt, Artificial
  synthetic
cuucucacacuucagauuucaac

SEQ ID NO: 554 - RNA, 23 nt, Artificial
  synthetic
uucucacacuucagauuucaacc

SEQ ID NO: 555 - RNA, 23 nt, Artificial
  synthetic
ucucacacuucagauuucaaccc

SEQ ID NO: 556 - RNA, 23 nt, Artificial
  synthetic
cucacacuucagauuucaacccg

SEQ ID NO: 557 - RNA, 23 nt, Artificial
  synthetic
acacuucagauuucaacccgaau

SEQ ID NO: 558 - RNA, 23 nt, Artificial
  synthetic
guucagaccaaagaguaguuaau

SEQ ID NO: 559 - RNA, 23 nt, Artificial
  synthetic
uucagaccaaagaguaguuaaug

SEQ ID NO: 560 - RNA, 23 nt, Artificial
  synthetic
gucucuacuaugccuaaacgcau

SEQ ID NO: 561 - RNA, 23 nt, Artificial
  synthetic
ucucuacuaugccuaaacgcaug

SEQ ID NO: 562 - RNA, 23 nt, Artificial
  synthetic
ucuacuaugccuaaacgcauguc

SEQ ID NO: 563 - RNA, 23 nt, Artificial
  synthetic
uacuucugaaucuauggaucaac

SEQ ID NO: 564 - RNA, 23 nt, Artificial
  synthetic
acuucugaaucuauggaucaacu

SEQ ID NO: 565 - RNA, 23 nt, Artificial
  synthetic
cuucugaaucuauggaucaacua

SEQ ID NO: 566 - RNA, 23 nt, Artificial
  synthetic
uucugaaucuauggaucaacuac

SEQ ID NO: 567 - RNA, 23 nt, Artificial
  synthetic
ucugaaucuauggaucaacuacu

SEQ ID NO: 568 - RNA, 23 nt, Artificial
  synthetic
cugaaucuauggaucaacuacua

SEQ ID NO: 569 - RNA, 23 nt, Artificial
  synthetic
ugaaucuauggaucaacuacuaa

SEQ ID NO: 570 - RNA, 23 nt, Artificial
  synthetic
gaaucuauggaucaacuacuaaa

SEQ ID NO: 571 - RNA, 23 nt, Artificial
  synthetic
uuuauacccaauaccuaugacgc

SEQ ID NO: 572 - RNA, 23 nt, Artificial
  synthetic
aagacauauagagcaguaccaaa

SEQ ID NO: 573 - RNA, 23 nt, Artificial
  synthetic
acauauagagcaguaccaaauau

SEQ ID NO: 574 - RNA, 23 nt, Artificial
  synthetic
cauauagagcaguaccaaauaug

SEQ ID NO: 575 - RNA, 23 nt, Artificial
  synthetic
auauagagcaguaccaaauaugc

SEQ ID NO: 576 - RNA, 23 nt, Artificial
  synthetic
auagagcaguaccaaauaugccc

SEQ ID NO: 577 - RNA, 23 nt, Artificial
  synthetic
caugucccaaauuaccauacaac

SEQ ID NO: 578 - RNA, 23 nt, Artificial
  synthetic
ugucccaaauuaccauacaacaa

SEQ ID NO: 579 - RNA, 23 nt, Artificial
  synthetic
acaagcccuucuuucuacuuugc

SEQ ID NO: 580 - RNA, 23 nt, Artificial
  synthetic
agcccuucuuucuacuuugccau

SEQ ID NO: 581 - RNA, 23 nt, Artificial
  synthetic
gcccuucuuucuacuuugccauu

SEQ ID NO: 582 - RNA, 23 nt, Artificial
  synthetic
cccuucuuucuacuuugccauuu

SEQ ID NO: 583 - RNA, 23 nt, Artificial
  synthetic
ccuucuuucuacuuugccauuuc

SEQ ID NO: 584 - RNA, 23 nt, Artificial
  synthetic
cuucuuucuacuuugccauuucc

SEQ ID NO: 585 - RNA, 23 nt, Artificial
  synthetic
uucuuucuacuuugccauuucca

SEQ ID NO: 586 - RNA, 23 nt, Artificial
  synthetic
ucuuucuacuuugccauuuccac

SEQ ID NO: 587 - RNA, 23 nt, Artificial
  synthetic
cuuucuacuuugccauuuccacg

SEQ ID NO: 588 - RNA, 23 nt, Artificial
  synthetic
cucauguacagucaggaaugguu

SEQ ID NO: 589 - RNA, 23 nt, Artificial
  synthetic
ucauguacagucaggaaugguuc

SEQ ID NO: 590 - RNA, 23 nt, Artificial
  synthetic
cauguacagucaggaaugguucc

SEQ ID NO: 591 - RNA, 23 nt, Artificial
  synthetic
gucaggaaugguuccuucucauc

SEQ ID NO: 592 - RNA, 23 nt, Artificial
  synthetic
aggaaugguuccuucucauccaa

SEQ ID NO: 593 - RNA, 23 nt, Artificial
  synthetic
gaaugguuccuucucauccaacu

SEQ ID NO: 594 - RNA, 23 nt, Artificial
  synthetic
aaugguuccuucucauccaacug

SEQ ID NO: 595 - RNA, 23 nt, Artificial
  synthetic
ugguuccuucucauccaacugcc

SEQ ID NO: 596 - RNA, 23 nt, Artificial
  synthetic
cccaugcgccaaugaugcuaaug

SEQ ID NO: 597 - RNA, 23 nt, Artificial
  synthetic
augcgccaaugaugcuaaugacg

SEQ ID NO: 598 - RNA, 23 nt, Artificial
  synthetic
gcgccaaugaugcuaaugacgac

SEQ ID NO: 599 - RNA, 23 nt, Artificial
  synthetic
cgccaaugaugcuaaugacgaca

SEQ ID NO: 600 - RNA, 23 nt, Artificial
  synthetic
caaugaugcuaaugacgacacag

SEQ ID NO: 601 - RNA, 23 nt, Artificial
  synthetic
aaugaugcuaaugacgacacagc

SEQ ID NO: 602 - RNA, 23 nt, Artificial
  synthetic
cucgcucaaagugcacuacagcc

SEQ ID NO: 603 - RNA, 23 nt, Artificial
  synthetic
acagcccauuccagucucgacaa

SEQ ID NO: 604 - RNA, 23 nt, Artificial
  synthetic
agcccauuccagucucgacaaca

SEQ ID NO: 605 - RNA, 23 nt, Artificial
  synthetic
cccaccaccaacagcaguuguaa

SEQ ID NO: 606 - RNA, 23 nt, Artificial
  synthetic
ccaccaccaacagcaguuguaag

SEQ ID NO: 607 - RNA, 23 nt, Artificial
  synthetic
caccaccaacagcaguuguaagg

SEQ ID NO: 608 - RNA, 23 nt, Artificial
  synthetic
ccaccaacagcaguuguaaggcu

SEQ ID NO: 609 - RNA, 23 nt, Artificial
  synthetic
accaacagcaguuguaaggcugc

SEQ ID NO: 610 - RNA, 23 nt, Artificial
  synthetic
cccuucuacugcuucuaccaacu

SEQ ID NO: 611 - RNA, 23 nt, Artificial
  synthetic
cuucuacugcuucuaccaacugg

SEQ ID NO: 612 - RNA, 23 nt, Artificial
  synthetic
uucuacugcuucuaccaacugga

SEQ ID NO: 613 - RNA, 23 nt, Artificial
  synthetic
uacugcuucuaccaacuggaagc

SEQ ID NO: 614 - RNA, 23 nt, Artificial
  synthetic
accaacuggaagcacagaaaacu

SEQ ID NO: 615 - RNA, 23 nt, Artificial
  synthetic
uguugauuucuuguaacauccaa

SEQ ID NO: 616 - RNA, 23 nt, Artificial
  synthetic
ugauuucuuguaacauccaauag

SEQ ID NO: 617 - RNA, 23 nt, Artificial
  synthetic
auuucuuguaacauccaauagga

SEQ ID NO: 618 - RNA, 23 nt, Artificial
  synthetic
uuucuuguaacauccaauaggaa

SEQ ID NO: 619 - RNA, 23 nt, Artificial
  synthetic
cuuguaacauccaauaggaaugc

SEQ ID NO: 620 - RNA, 23 nt, Artificial
  synthetic
uguaacauccaauaggaaugcua

SEQ ID NO: 621 - RNA, 23 nt, Artificial
  synthetic
guaacauccaauaggaaugcuaa

SEQ ID NO: 622 - RNA, 23 nt, Artificial
  synthetic
uaacauccaauaggaaugcuaac

SEQ ID NO: 623 - RNA, 23 nt, Artificial
  synthetic
aacauccaauaggaaugcuaaca

SEQ ID NO: 624 - RNA, 23 nt, Artificial
  synthetic
ccaauaggaaugcuaacaguuca

SEQ ID NO: 625 - RNA, 23 nt, Artificial
  synthetic
caauaggaaugcuaacaguucac

SEQ ID NO: 626 - RNA, 23 nt, Artificial
  synthetic
aauaggaaugcuaacaguucacu

SEQ ID NO: 627 - RNA, 23 nt, Artificial
  synthetic
auaggaaugcuaacaguucacuu

SEQ ID NO: 628 - RNA, 23 nt, Artificial
  synthetic
uaggaaugcuaacaguucacuug

SEQ ID NO: 629 - RNA, 23 nt, Artificial
  synthetic
aggaaugcuaacaguucacuugc

SEQ ID NO: 630 - RNA, 23 nt, Artificial
  synthetic
augcuaacaguucacuugcagug

SEQ ID NO: 631 - RNA, 23 nt, Artificial
  synthetic
aacaguucacuugcaguggaaga

SEQ ID NO: 632 - RNA, 23 nt, Artificial
  synthetic
uggaccgaguagaggcauuuagg

SEQ ID NO: 633 - RNA, 23 nt, Artificial
  synthetic
ggaccgaguagaggcauuuagga

SEQ ID NO: 634 - RNA, 23 nt, Artificial
  synthetic
ggggcuauuccauaauuccauau

SEQ ID NO: 635 - RNA, 23 nt, Artificial
  synthetic
cuugccgaaacuggaaguuauuu

SEQ ID NO: 636 - RNA, 23 nt, Artificial
  synthetic
ugccgaaacuggaaguuauuuau

SEQ ID NO: 637 - RNA, 23 nt, Artificial
  synthetic
gccgaaacuggaaguuauuuauu

SEQ ID NO: 638 - RNA, 23 nt, Artificial
  synthetic
ccgaaacuggaaguuauuuauuu

SEQ ID NO: 639 - RNA, 23 nt, Artificial
  synthetic
cgaaacuggaaguuauuuauuuu

SEQ ID NO: 640 - RNA, 23 nt, Artificial
  synthetic
uuuaauaacccuugaaagucaug

SEQ ID NO: 641 - RNA, 23 nt, Artificial
  synthetic
uuaauaacccuugaaagucauga

SEQ ID NO: 642 - RNA, 23 nt, Artificial
  synthetic
auaacccuugaaagucaugaaca

SEQ ID NO: 643 - RNA, 23 nt, Artificial
  synthetic
cccuugaaagucaugaacacauc

SEQ ID NO: 644 - RNA, 23 nt, Artificial
  synthetic
aaagucaugaacacaucagcuag

SEQ ID NO: 645 - RNA, 23 nt, Artificial
  synthetic
aagucaugaacacaucagcuagc

SEQ ID NO: 646 - RNA, 23 nt, Artificial
  synthetic
agucaugaacacaucagcuagca

SEQ ID NO: 647 - RNA, 23 nt, Artificial
  synthetic
gucaugaacacaucagcuagcaa

SEQ ID NO: 648 - RNA, 23 nt, Artificial
  synthetic
ucaugaacacaucagcuagcaaa

SEQ ID NO: 649 - RNA, 23 nt, Artificial
  synthetic
ucaugaacacaucagcuagcaaa

SEQ ID NO: 650 - RNA, 23 nt, Artificial
  synthetic
caugaacacaucagcuagcaaaa

SEQ ID NO: 651 - RNA, 23 nt, Artificial
  synthetic
augaacacaucagcuagcaaaag

SEQ ID NO: 652 - RNA, 23 nt, Artificial
  synthetic
ugaacacaucagcuagcaaaaga

SEQ ID NO: 653 - RNA, 23 nt, Artificial
  synthetic
cacaucagcuagcaaaagaagua

SEQ ID NO: 654 - RNA, 23 nt, Artificial
  synthetic
agcuagcaaaagaaguaacaaga

SEQ ID NO: 655 - RNA, 23 nt, Artificial
  synthetic
aaguaacaagagugauucuugcu

SEQ ID NO: 656 - RNA, 23 nt, Artificial
  synthetic
aguaacaagagugauucuugcug

SEQ ID NO: 657 - RNA, 23 nt, Artificial
  synthetic
guaacaagagugauucuugcugc

SEQ ID NO: 658 - RNA, 23 nt, Artificial
  synthetic
caagagugauucuugcugcuauu

SEQ ID NO: 659 - RNA, 23 nt, Artificial
  synthetic
aagagugauucuugcugcuauua

SEQ ID NO: 660 - RNA, 23 nt, Artificial
  synthetic
gagugauucuugcugcuauuacu

SEQ ID NO: 661 - RNA, 23 nt, Artificial
  synthetic
acuuggaacgcccuuuuacuaaa

SEQ ID NO: 662 - RNA, 23 nt, Artificial
  synthetic
cuuggaacgcccuuuuacuaaac

SEQ ID NO: 663 - RNA, 23 nt, Artificial
  synthetic
uggaacgcccuuuuacuaaacuu

SEQ ID NO: 664 - RNA, 23 nt, Artificial
  synthetic
ggaacgcccuuuuacuaaacuug

SEQ ID NO: 665 - RNA, 23 nt, Artificial
  synthetic
gaacgcccuuuuacuaaacuuga

SEQ ID NO: 666 - RNA, 23 nt, Artificial
  synthetic
aacgcccuuuuacuaaacuugac

SEQ ID NO: 667 - RNA, 23 nt, Artificial
  synthetic
aaguuucaguaaauucuuaccgu

SEQ ID NO: 668 - RNA, 23 nt, Artificial
  synthetic
aguuucaguaaauucuuaccguc

SEQ ID NO: 669 - RNA, 23 nt, Artificial
  synthetic
guuucaguaaauucuuaccguca

SEQ ID NO: 670 - RNA, 23 nt, Artificial
  synthetic
uuucaguaaauucuuaccgucaa

SEQ ID NO: 671 - RNA, 23 nt, Artificial
  synthetic
uucaguaaauucuuaccgucaaa

SEQ ID NO: 672 - RNA, 23 nt, Artificial
  synthetic
ucaguaaauucuuaccgucaaac

SEQ ID NO: 673 - RNA, 23 nt, Artificial
  synthetic
caguaaauucuuaccgucaaacu

SEQ ID NO: 674 - RNA, 23 nt, Artificial
  synthetic
aguaaauucuuaccgucaaacug

SEQ ID NO: 675 - RNA, 23 nt, Artificial
  synthetic
guaaauucuuaccgucaaacuga

SEQ ID NO: 676 - RNA, 23 nt, Artificial
  synthetic
uaaauucuuaccgucaaacugac

SEQ ID NO: 677 - RNA, 23 nt, Artificial
  synthetic
aaauucuuaccgucaaacugacg

SEQ ID NO: 678 - RNA, 23 nt, Artificial
  synthetic
aauucuuaccgucaaacugacgg

SEQ ID NO: 679 - RNA, 23 nt, Artificial
  synthetic
auucuuaccgucaaacugacgga

SEQ ID NO: 680 - RNA, 23 nt, Artificial
  synthetic
uucuuaccgucaaacugacggau

SEQ ID NO: 681 - RNA, 23 nt, Artificial
  synthetic
ucuuaccgucaaacugacggauu

SEQ ID NO: 682 - RNA, 23 nt, Artificial
  synthetic
cuuaccgucaaacugacggauua

SEQ ID NO: 683 - RNA, 23 nt, Artificial
  synthetic
uuaccgucaaacugacggauuau

SEQ ID NO: 684 - RNA, 23 nt, Artificial
  synthetic
caaacugacggauuauuauuuau

SEQ ID NO: 685 - RNA, 23 nt, Artificial
  synthetic
caaguuugaugaggugaucacug

SEQ ID NO: 686 - RNA, 23 nt, Artificial
  synthetic
ucacugucuacagugguucaacu

SEQ ID NO: 687 - RNA, 23 nt, Artificial
  synthetic
cacugucuacagugguucaacuu

SEQ ID NO: 688 - RNA, 23 nt, Artificial
  synthetic
gucuacagugguucaacuuuuaa

SEQ ID NO: 689 - RNA, 23 nt, Artificial
  synthetic
ucuacagugguucaacuuuuaag

SEQ ID NO: 690 - RNA, 23 nt, Artificial
  synthetic
guucaacuuuuaaguuaagggaa

SEQ ID NO: 691 - RNA, 23 nt, Artificial
  synthetic
ucaacuuuuaaguuaagggaaaa

SEQ ID NO: 692 - RNA, 23 nt, Artificial
  synthetic
ggaaaaacuuuuacuuuguagau

SEQ ID NO: 693 - RNA, 23 nt, Artificial
  synthetic
ugccucagccuacgauuucuuuu

SEQ ID NO: 694 - RNA, 23 nt, Artificial
  synthetic
gccucagccuacgauuucuuuug

SEQ ID NO: 695 - RNA, 23 nt, Artificial
  synthetic
ccucagccuacgauuucuuuuga

SEQ ID NO: 696 - DNA, 23 bp, Artificial
  synthetic
atgaggatggttcatatacttac

SEQ ID NO: 697 - DNA, 23 bp, Artificial
  synthetic
caaatgtgaagtacaagtgaaaa

SEQ ID NO: 698 - RNA, 23 nt, Artificial
  synthetic
ugaggaugguucauauacuuacg

SEQ ID NO: 699 - RNA, 23 nt, Artificial
  synthetic
augugaaguacaagugaaaaacg

SEQ ID NO: 700 - RNA, 23 nt, Artificial
  synthetic
ugaaggaguuuuuaaaacauaca

SEQ ID NO: 701 - RNA, 23 nt, Artificial
  synthetic
gaaggaguuuuuaaaacauacag

SEQ ID NO: 702 - RNA, 23 nt, Artificial
  synthetic
uaaaacauacaguccuaagugug

SEQ ID NO: 703 - RNA, 23 nt, Artificial
  synthetic
aaaacauacaguccuaaguguga

SEQ ID NO: 704 - RNA, 23 nt, Artificial
  synthetic
aaacauacaguccuaagugugac

SEQ ID NO: 705 - RNA, 23 nt, Artificial
  synthetic
augcugcacaugagaaaaguaca

SEQ ID NO: 706 - RNA, 23 nt, Artificial
  synthetic
ugcugcacaugagaaaaguacag

SEQ ID NO: 707 - RNA, 23 nt, Artificial
  synthetic
uaauggagaguguuuuguucaaa

SEQ ID NO: 708 - RNA, 23 nt, Artificial
  synthetic
auggagaguguuuuguucaaaug

SEQ ID NO: 709 - RNA, 23 nt, Artificial
  synthetic
guuuuguucaaaugcucagacuu

SEQ ID NO: 710 - RNA, 23 nt, Artificial
  synthetic
uuuguucaaaugcucagacuucg

SEQ ID NO: 711 - RNA, 23 nt, Artificial
  synthetic
uuguucaaaugcucagacuucgu

SEQ ID NO: 712 - RNA, 23 nt, Artificial
  synthetic
uguucaaaugcucagacuucguu

SEQ ID NO: 713 - RNA, 23 nt, Artificial
  synthetic
guucaaaugcucagacuucguug

SEQ ID NO: 714 - RNA, 23 nt, Artificial
  synthetic
uucaaaugcucagacuucguugu

SEQ ID NO: 715 - RNA, 23 nt, Artificial
  synthetic
ucaaaugcucagacuucguugug

SEQ ID NO: 716 - RNA, 23 nt, Artificial
  synthetic
caaaugcucagacuucguugugg

SEQ ID NO: 717 - RNA, 23 nt, Artificial
  synthetic
ugacauguuucgauauaaugaag

SEQ ID NO: 718 - RNA, 23 nt, Artificial
  synthetic
aguuuaucuucauauacgguucc

SEQ ID NO: 719 - RNA, 23 nt, Artificial
  synthetic
aaagggacaacucagaagaauuu

SEQ ID NO: 720 - RNA, 23 nt, Artificial
  synthetic
aagggacaacucagaagaauuuc

SEQ ID NO: 721 - RNA, 23 nt, Artificial
  synthetic
agggacaacucagaagaauuucu

SEQ ID NO: 722 - RNA, 23 nt, Artificial
  synthetic
gggacaacucagaagaauuucuu

SEQ ID NO: 723 - DNA, 23 bp, Artificial
  synthetic
cacttctcacacttcagatttca

SEQ ID NO: 724 - DNA, 23 bp, Artificial
  synthetic
acttctcacacttcagatttcaa

SEQ ID NO: 725 - DNA, 23 bp, Artificial
  synthetic
gttcagaccaaagagtagttaat

SEQ ID NO: 726 - DNA, 23 bp, Artificial
  synthetic
ttcagaccaaagagtagttaatg

SEQ ID NO: 727 - RNA, 23 nt, Artificial
  synthetic
gcugcuucucacacuucagauuu

SEQ ID NO: 728 - RNA, 23 nt, Artificial
  synthetic
cugcuucucacacuucagauuuc

SEQ ID NO: 729 - RNA, 23 nt, Artificial
  synthetic
ccuagaauuuguaucccacaauc

SEQ ID NO: 730 - RNA, 23 nt, Artificial
  synthetic
cuagaauuuguaucccacaaucc

SEQ ID NO: 731 - RNA, 23 nt, Artificial
  synthetic
uagaauuuguaucccacaauccc

SEQ ID NO: 732 - RNA, 23 nt, Artificial
  synthetic
aagugaaacaucaccuagcuuuu

SEQ ID NO: 733 - RNA, 23 nt, Artificial
  synthetic
agugaaacaucaccuagcuuuuc

SEQ ID NO: 734 - RNA, 23 nt, Artificial
  synthetic
gugaaacaucaccuagcuuuuca

SEQ ID NO: 735 - RNA, 23 nt, Artificial
  synthetic
ugaaacaucaccuagcuuuucaa

SEQ ID NO: 736 - RNA, 23 nt, Artificial
  synthetic
gaaacaucaccuagcuuuucaaa

SEQ ID NO: 737 - RNA, 23 nt, Artificial
  synthetic
aaacaucaccuagcuuuucaaaa

SEQ ID NO: 738 - RNA, 23 nt, Artificial
  synthetic
aacaucaccuagcuuuucaaaag

SEQ ID NO: 739 - RNA, 23 nt, Artificial
  synthetic
acaucaccuagcuuuucaaaagc

SEQ ID NO: 740 - RNA, 23 nt, Artificial
  synthetic
caucaccuagcuuuucaaaagcu

SEQ ID NO: 741 - RNA, 23 nt, Artificial
  synthetic
aucaccuagcuuuucaaaagcug

SEQ ID NO: 742 - RNA, 23 nt, Artificial
  synthetic
ucaccuagcuuuucaaaagcuga

SEQ ID NO: 743 - RNA, 23 nt, Artificial
  synthetic
caccuagcuuuucaaaagcugac

SEQ ID NO: 744 - DNA, 23 bp, Artificial
  synthetic
cttctgaatctatggatcaacta

SEQ ID NO: 745 - DNA, 23 bp, Artificial
  synthetic
ttctgaatctatggatcaactac

SEQ ID NO: 746 - RNA, 23 nt, Artificial
  synthetic
uacaucugaaucuauggaucaac

SEQ ID NO: 747 - RNA, 23 nt, Artificial
  synthetic
acaucugaaucuauggaucaacu

SEQ ID NO: 748 - RNA, 23 nt, Artificial
  synthetic
gaaucuauggaucaacuacuaag

SEQ ID NO: 749 - RNA, 23 nt, Artificial
  synthetic
aaucuauggaucaacuacuaagc

SEQ ID NO: 750 - RNA, 23 nt, Artificial
  synthetic
aucuauggaucaacuacuaagca

SEQ ID NO: 751 - RNA, 23 nt, Artificial
  synthetic
ucuauggaucaacuacuaagcaa

SEQ ID NO: 752 - RNA, 23 nt, Artificial
  synthetic
cuauggaucaacuacuaagcaaa

SEQ ID NO: 753 - RNA, 23 nt, Artificial
  synthetic
uauggaucaacuacuaagcaaaa

SEQ ID NO: 754 - RNA, 23 nt, Artificial
  synthetic
auggaucaacuacuaagcaaaaa

SEQ ID NO: 755 - RNA, 23 nt, Artificial
  synthetic
uggaucaacuacuaagcaaaaau

SEQ ID NO: 756 - RNA, 23 nt, Artificial
  synthetic
agaaggagaaaagucacgagauu

SEQ ID NO: 757 - RNA, 23 nt, Artificial
  synthetic
aaggaguucaacccucguucuuu

SEQ ID NO: 758 - RNA, 23 nt, Artificial
  synthetic
gaguucaacccucguucuuucuc

SEQ ID NO: 759 - RNA, 23 nt, Artificial
  synthetic
aguucaacccucguucuuucucu

SEQ ID NO: 760 - RNA, 23 nt, Artificial
  synthetic
guucaacccucguucuuucucuc

SEQ ID NO: 761 - RNA, 23 nt, Artificial
  synthetic
uucaacccucguucuuucucuca

SEQ ID NO: 762 - RNA, 23 nt, Artificial
  synthetic
ucaacccucguucuuucucucag

SEQ ID NO: 763 - RNA, 23 nt, Artificial
  synthetic
cucguucuuucucucagccaaag

SEQ ID NO: 764 - RNA, 23 nt, Artificial
  synthetic
ucguucuuucucucagccaaagc

SEQ ID NO: 765 - RNA, 23 nt, Artificial
  synthetic
acaguccugucauacaagguaau

SEQ ID NO: 766 - RNA, 23 nt, Artificial
  synthetic
caguccugucauacaagguaaug

SEQ ID NO: 767 - RNA, 23 nt, Artificial
  synthetic
ccugucauacaagguaaugccag

SEQ ID NO: 768 - RNA, 23 nt, Artificial
  synthetic
cugucauacaagguaaugccagg

SEQ ID NO: 769 - RNA, 23 nt, Artificial
  synthetic
uuucuacuuugccauuuccaccg

SEQ ID NO: 770 - RNA, 23 nt, Artificial
  synthetic
ggaagcacagaaaacuagaacuu

SEQ ID NO: 771 - RNA, 23 nt, Artificial
  synthetic
aagcacagaaaacuagaacuuca

SEQ ID NO: 772 - RNA, 23 nt, Artificial
  synthetic
gcacagaaaacuagaacuucauu

SEQ ID NO: 773 - RNA, 23 nt, Artificial
  synthetic
cacagaaaacuagaacuucauug

SEQ ID NO: 774 - DNA, 23 bp, Artificial
  synthetic
ccgaaactggaagttatttattt

SEQ ID NO: 775 - DNA, 23 bp, Artificial
  synthetic
aaagtcatgaacacatcagctag

SEQ ID NO: 776 - DNA, 23 bp, Artificial
  synthetic
aagtcatgaacacatcagctagc

SEQ ID NO: 777 - RNA, 23 nt, Artificial
  synthetic
ucugcuugcugaaacuggaaguu

SEQ ID NO: 778 - RNA, 23 nt, Artificial
  synthetic
ugcugaaacuggaaguuauuuau

SEQ ID NO: 779 - RNA, 23 nt, Artificial
  synthetic
gcugaaacuggaaguuauuuauu

SEQ ID NO: 780 - RNA, 23 nt, Artificial
  synthetic
ccuugagagucaugaacacauca

SEQ ID NO: 781 - RNA, 23 nt, Artificial
  synthetic
ucaugaacacaucagcuagcaac

SEQ ID NO: 782 - DNA, 23 bp, Artificial
  synthetic
aaagaagtaacaagagtgattct

SEQ ID NO: 783 - RNA, 23 nt, Artificial
  synthetic
caugaacacaucagcuagcaaca

SEQ ID NO: 784 - RNA, 23 nt, Artificial
  synthetic
acaucagcuagcaacagaaguaa

SEQ ID NO: 785 - RNA, 23 nt, Artificial
  synthetic
aucagcuagcaacagaaguaaca

SEQ ID NO: 786 - RNA, 23 nt, Artificial
  synthetic
agcuagcaacagaaguaacaaga

SEQ ID NO: 787 - RNA, 23 nt, Artificial
  synthetic
gcuagcaacagaaguaacaagag

SEQ ID NO: 788 - RNA, 23 nt, Artificial
  synthetic
uucuugcugcuauuaccgcuuua

SEQ ID NO: 789 - RNA, 23 nt, Artificial
  synthetic
uugcugcuauuaccgcuuuaaaa

SEQ ID NO: 790 - RNA, 23 nt, Artificial
  synthetic
cgcccuuuuacuaaacuugacag

SEQ ID NO: 791 - RNA, 23 nt, Artificial
  synthetic
cccuuuuacuaaacuugacagaa

SEQ ID NO: 792 - RNA, 23 nt, Artificial
  synthetic
ccuuuuacuaaacuugacagaag

SEQ ID NO: 793 - RNA, 23 nt, Artificial
  synthetic
uuuacuaaacuugacagaaguuc

SEQ ID NO: 794 - RNA, 23 nt, Artificial
  synthetic
uacuaaacuugacagaaguucag

SEQ ID NO: 795 - RNA, 23 nt, Artificial
  synthetic
aaacuugacagaaguucaguaaa

SEQ ID NO: 796 - RNA, 23 nt, Artificial
  synthetic
cuugacagaaguucaguaaauuc

SEQ ID NO: 797 - RNA, 23 nt, Artificial
  synthetic
ugacagaaguucaguaaauucuu

SEQ ID NO: 798 - RNA, 23 nt, Artificial
  synthetic
gacagaaguucaguaaauucuua

SEQ ID NO: 799 - RNA, 23 nt, Artificial
  synthetic
acagaaguucaguaaauucuuac

SEQ ID NO: 800 - RNA, 23 nt, Artificial
  synthetic
cgccaaacugacggauuauuauu

SEQ ID NO: 801 - DNA, 23 bp, Artificial
  synthetic
gaaaaacttttactttgtagata

SEQ ID NO: 802 - RNA, 23 nt, Artificial
  synthetic
aaguuaagggaaaacuuuuacuu

SEQ ID NO: 803 - RNA, 23 nt, Artificial
  synthetic
aguuaagggaaaacuuuuacuuu

SEQ ID NO: 804 - RNA, 23 nt, Artificial
  synthetic
guuaagggaaaacuuuuacuuug

SEQ ID NO: 805 - RNA, 23 nt, Artificial
  synthetic
uaagggaaaacuuuuacuuugua

SEQ ID NO: 806 - RNA, 23 nt, Artificial
  synthetic
aagggaaaacuuuuacuuuguag

SEQ ID NO: 807 - RNA, 23 nt, Artificial
  synthetic
gggaaaacuuuuacuuuguagau

SEQ ID NO: 808 - RNA, 21 nt, Artificial
  synthetic
uccgacuuccgguaaagaguu

SEQ ID NO: 809 - RNA, 21 nt, Artificial
  synthetic
ccgacuuccgguaaagagucu

SEQ ID NO: 810 - RNA, 21 nt, Artificial
  synthetic
cgacuuccgguaaagaguccu

SEQ ID NO: 811 - RNA, 21 nt, Artificial
  synthetic
aaugugaaguacaagugaaaa

SEQ ID NO: 812 - RNA, 21 nt, Artificial
  synthetic
augugaaguacaagugaaaaa

SEQ ID NO: 813 - RNA, 21 nt, Artificial
  synthetic
caugagaaaaguacagaaucu

SEQ ID NO: 814 - RNA, 21 nt, Artificial
  synthetic
cacuucucacacuucagauuu

SEQ ID NO: 815 - RNA, 21 nt, Artificial
  synthetic
acuucucacacuucagauuuc

SEQ ID NO: 816 - RNA, 21 nt, Artificial
  synthetic
cuucucacacuucagauuuca

SEQ ID NO: 817 - RNA, 21 nt, Artificial
  synthetic
uucucacacuucagauuucaa

SEQ ID NO: 818 - RNA, 21 nt, Artificial
  synthetic
ucucacacuucagauuucaau

SEQ ID NO: 819 - RNA, 21 nt, Artificial
  synthetic
cucacacuucagauuucaacu

SEQ ID NO: 820 - RNA, 21 nt, Artificial
  synthetic
ucacacuucagauuucaaccu

SEQ ID NO: 821 - RNA, 21 nt, Artificial
  synthetic
cacacuucagauuucaacccu

SEQ ID NO: 822 - RNA, 21 nt, Artificial
  synthetic
acuucagauuucaacccgaau

SEQ ID NO: 823 - RNA, 21 nt, Artificial
  synthetic
ucagaccaaagaguaguuaau

SEQ ID NO: 824 - RNA, 21 nt, Artificial
  synthetic
cagaccaaagaguaguuaauu

SEQ ID NO: 825 - RNA, 21 nt, Artificial
  synthetic
cucuacuaugccuaaacgcau

SEQ ID NO: 826 - RNA, 21 nt, Artificial
  synthetic
ucuacuaugccuaaacgcauu

SEQ ID NO: 827 - RNA, 21 nt, Artificial
  synthetic
uacuaugccuaaacgcauguu

SEQ ID NO: 828 - RNA, 21 nt, Artificial
  synthetic
cuucugaaucuauggaucaau

SEQ ID NO: 829 - RNA, 21 nt, Artificial
  synthetic
uucugaaucuauggaucaacu

SEQ ID NO: 830 - RNA, 21 nt, Artificial
  synthetic
ucugaaucuauggaucaacua

SEQ ID NO: 831 - RNA, 21 nt, Artificial
  synthetic
cugaaucuauggaucaacuau

SEQ ID NO: 832 - RNA, 21 nt, Artificial
  synthetic
ugaaucuauggaucaacuacu

SEQ ID NO: 833 - RNA, 21 nt, Artificial
  synthetic
gaaucuauggaucaacuacua

SEQ ID NO: 834 - RNA, 21 nt, Artificial
  synthetic
aaucuauggaucaacuacuaa

SEQ ID NO: 835 - RNA, 21 nt, Artificial
  synthetic
aucuauggaucaacuacuaaa

SEQ ID NO: 836 - RNA, 21 nt, Artificial
  synthetic
uauacccaauaccuaugacgu

SEQ ID NO: 837 - RNA, 21 nt, Artificial
  synthetic
gacauauagagcaguaccaaa

SEQ ID NO: 838 - RNA, 21 nt, Artificial
  synthetic
auauagagcaguaccaaauau

SEQ ID NO: 839 - RNA, 21 nt, Artificial
  synthetic
uauagagcaguaccaaauauu

SEQ ID NO: 840 - RNA, 21 nt, Artificial
  synthetic
auagagcaguaccaaauaugu

SEQ ID NO: 841 - RNA, 21 nt, Artificial
  synthetic
agagcaguaccaaauaugccu

SEQ ID NO: 842 - RNA, 21 nt, Artificial
  synthetic
ugucccaaauuaccauacaau

SEQ ID NO: 843 - RNA, 21 nt, Artificial
  synthetic
ucccaaauuaccauacaacaa

SEQ ID NO: 844 - RNA, 21 nt, Artificial
  synthetic
aagcccuucuuucuacuuugu

SEQ ID NO: 845 - RNA, 21 nt, Artificial
  synthetic
cccuucuuucuacuuugccau

SEQ ID NO: 846 - RNA, 21 nt, Artificial
  synthetic
ccuucuuucuacuuugccauu

SEQ ID NO: 847 - RNA, 21 nt, Artificial
  synthetic
cuucuuucuacuuugccauuu

SEQ ID NO: 848 - RNA, 21 nt, Artificial
  synthetic
uucuuucuacuuugccauuuc

SEQ ID NO: 849 - RNA, 21 nt, Artificial
  synthetic
ucuuucuacuuugccauuucu

SEQ ID NO: 850 - RNA, 21 nt, Artificial
  synthetic
cuuucuacuuugccauuucca

SEQ ID NO: 851 - RNA, 21 nt, Artificial
  synthetic
uuucuacuuugccauuuccau

SEQ ID NO: 852 - RNA, 21 nt, Artificial
  synthetic
uucuacuuugccauuuccacu

SEQ ID NO: 853 - RNA, 21 nt, Artificial
  synthetic
cauguacagucaggaaugguu

SEQ ID NO: 854 - RNA, 21 nt, Artificial
  synthetic
auguacagucaggaaugguuu

SEQ ID NO: 855 - RNA, 21 nt, Artificial
  synthetic
uguacagucaggaaugguucu

SEQ ID NO: 856 - RNA, 21 nt, Artificial
  synthetic
caggaaugguuccuucucauu

SEQ ID NO: 857 - RNA, 21 nt, Artificial
  synthetic
gaaugguuccuucucauccaa

SEQ ID NO: 858 - RNA, 21 nt, Artificial
  synthetic
augguuccuucucauccaacu

SEQ ID NO: 859 - RNA, 21 nt, Artificial
  synthetic
ugguuccuucucauccaacuu

SEQ ID NO: 860 - RNA, 21 nt, Artificial
  synthetic
guuccuucucauccaacugcu

SEQ ID NO: 861 - RNA, 21 nt, Artificial
  synthetic
caugcgccaaugaugcuaauu

SEQ ID NO: 862 - RNA, 21 nt, Artificial
  synthetic
gcgccaaugaugcuaaugacu

SEQ ID NO: 863 - RNA, 21 nt, Artificial
  synthetic
gccaaugaugcuaaugacgau

SEQ ID NO: 864 - RNA, 21 nt, Artificial
  synthetic
ccaaugaugcuaaugacgaca

SEQ ID NO: 865 - RNA, 21 nt, Artificial
  synthetic
augaugcuaaugacgacacau

SEQ ID NO: 866 - RNA, 21 nt, Artificial
  synthetic
ugaugcuaaugacgacacagu

SEQ ID NO: 867 - RNA, 21 nt, Artificial
  synthetic
cgcucaaagugcacuacagcu

SEQ ID NO: 868 - RNA, 21 nt, Artificial
  synthetic
agcccauuccagucucgacaa

SEQ ID NO: 869 - RNA, 21 nt, Artificial
  synthetic
cccauuccagucucgacaaca

SEQ ID NO: 870 - RNA, 21 nt, Artificial
  synthetic
caccaccaacagcaguuguaa

SEQ ID NO: 871 - RNA, 21 nt, Artificial
  synthetic
accaccaacagcaguuguaau

SEQ ID NO: 872 - RNA, 21 nt, Artificial
  synthetic
ccaccaacagcaguuguaagu

SEQ ID NO: 873 - RNA, 21 nt, Artificial
  synthetic
accaacagcaguuguaaggcu

SEQ ID NO: 874 - RNA, 21 nt, Artificial
  synthetic
caacagcaguuguaaggcugu

SEQ ID NO: 875 - RNA, 21 nt, Artificial
  synthetic
cuucuacugcuucuaccaacu

SEQ ID NO: 876 - RNA, 21 nt, Artificial
  synthetic
ucuacugcuucuaccaacugu

SEQ ID NO: 877 - RNA, 21 nt, Artificial
  synthetic
cuacugcuucuaccaacugga

SEQ ID NO: 878 - RNA, 21 nt, Artificial
  synthetic
cugcuucuaccaacuggaagu

SEQ ID NO: 879 - RNA, 21 nt, Artificial
  synthetic
caacuggaagcacagaaaacu

SEQ ID NO: 880 - RNA, 21 nt, Artificial
  synthetic
uugauuucuuguaacauccaa

SEQ ID NO: 881 - RNA, 21 nt, Artificial
  synthetic
auuucuuguaacauccaauau

SEQ ID NO: 882 - RNA, 21 nt, Artificial
  synthetic
uucuuguaacauccaauagga

SEQ ID NO: 883 - RNA, 21 nt, Artificial
  synthetic
ucuuguaacauccaauaggaa

SEQ ID NO: 884 - RNA, 21 nt, Artificial
  synthetic
uguaacauccaauaggaaugu

SEQ ID NO: 885 - RNA, 21 nt, Artificial
  synthetic
uaacauccaauaggaaugcua

SEQ ID NO: 886 - RNA, 21 nt, Artificial
  synthetic
aacauccaauaggaaugcuaa

SEQ ID NO: 887 - RNA, 21 nt, Artificial
  synthetic
acauccaauaggaaugcuaau

SEQ ID NO: 888 - RNA, 21 nt, Artificial
  synthetic
cauccaauaggaaugcuaaca

SEQ ID NO: 889 - RNA, 21 nt, Artificial
  synthetic
aauaggaaugcuaacaguuca

SEQ ID NO: 890 - RNA, 21 nt, Artificial
  synthetic
auaggaaugcuaacaguucau

SEQ ID NO: 891 - RNA, 21 nt, Artificial
  synthetic
uaggaaugcuaacaguucacu

SEQ ID NO: 892 - RNA, 21 nt, Artificial
  synthetic
aggaaugcuaacaguucacuu

SEQ ID NO: 893 - RNA, 21 nt, Artificial
  synthetic
ggaaugcuaacaguucacuuu

SEQ ID NO: 894 - RNA, 21 nt, Artificial
  synthetic
gaaugcuaacaguucacuugu

SEQ ID NO: 895 - RNA, 21 nt, Artificial
  synthetic
gcuaacaguucacuugcaguu

SEQ ID NO: 896 - RNA, 21 nt, Artificial
  synthetic
caguucacuugcaguggaaga

SEQ ID NO: 897 - RNA, 21 nt, Artificial
  synthetic
gaccgaguagaggcauuuagu

SEQ ID NO: 898 - RNA, 21 nt, Artificial
  synthetic
accgaguagaggcauuuagga

SEQ ID NO: 899 - RNA, 21 nt, Artificial
  synthetic
ggcuauuccauaauuccauau

SEQ ID NO: 900 - RNA, 21 nt, Artificial
  synthetic
ugccgaaacuggaaguuauuu

SEQ ID NO: 901 - RNA, 21 nt, Artificial
  synthetic
ccgaaacuggaaguuauuuau

SEQ ID NO: 902 - RNA, 21 nt, Artificial
  synthetic
cgaaacuggaaguuauuuauu

SEQ ID NO: 903 - RNA, 21 nt, Artificial
  synthetic
gaaacuggaaguuauuuauuu

SEQ ID NO: 904 - RNA, 21 nt, Artificial
  synthetic
aaacuggaaguuauuuauuuu

SEQ ID NO: 905 - RNA, 21 nt, Artificial
  synthetic
uaauaacccuugaaagucauu

SEQ ID NO: 906 - RNA, 21 nt, Artificial
  synthetic
aauaacccuugaaagucauga

SEQ ID NO: 907 - RNA, 21 nt, Artificial
  synthetic
aacccuugaaagucaugaaca

SEQ ID NO: 908 - RNA, 21 nt, Artificial
  synthetic
cuugaaagucaugaacacauu

SEQ ID NO: 909 - RNA, 21 nt, Artificial
  synthetic
agucaugaacacaucagcuau

SEQ ID NO: 910 - RNA, 21 nt, Artificial
  synthetic
gucaugaacacaucagcuagu

SEQ ID NO: 911 - RNA, 21 nt, Artificial
  synthetic
ucaugaacacaucagcuagca

SEQ ID NO: 912 - RNA, 21 nt, Artificial
  synthetic
caugaacacaucagcuagcaa

SEQ ID NO: 913 - RNA, 21 nt, Artificial
  synthetic
augaacacaucagcuagcaaa

SEQ ID NO: 914 - RNA, 21 nt, Artificial
  synthetic
augaacacaucagcuagcaaa

SEQ ID NO: 915 - RNA, 21 nt, Artificial
  synthetic
ugaacacaucagcuagcaaaa

SEQ ID NO: 916 - RNA, 21 nt, Artificial
  synthetic
gaacacaucagcuagcaaaau

SEQ ID NO: 917 - RNA, 21 nt, Artificial
  synthetic
aacacaucagcuagcaaaaga

SEQ ID NO: 918 - RNA, 21 nt, Artificial
  synthetic
caucagcuagcaaaagaagua

SEQ ID NO: 919 - RNA, 21 nt, Artificial
  synthetic
cuagcaaaagaaguaacaaga

SEQ ID NO: 920 - RNA, 21 nt, Artificial
  synthetic
guaacaagagugauucuugcu

SEQ ID NO: 921 - RNA, 21 nt, Artificial
  synthetic
uaacaagagugauucuugcuu

SEQ ID NO: 922 - RNA, 21 nt, Artificial
  synthetic
aacaagagugauucuugcugu

SEQ ID NO: 923 - RNA, 21 nt, Artificial
  synthetic
agagugauucuugcugcuauu

SEQ ID NO: 924 - RNA, 21 nt, Artificial
  synthetic
gagugauucuugcugcuauua

SEQ ID NO: 925 - RNA, 21 nt, Artificial
  synthetic
gugauucuugcugcuauuacu

SEQ ID NO: 926 - RNA, 21 nt, Artificial
  synthetic
uuggaacgcccuuuuacuaaa

SEQ ID NO: 927 - RNA, 21 nt, Artificial
  synthetic
uggaacgcccuuuuacuaaau

SEQ ID NO: 928 - RNA, 21 nt, Artificial
  synthetic
gaacgcccuuuuacuaaacuu

SEQ ID NO: 929 - RNA, 21 nt, Artificial
  synthetic
aacgcccuuuuacuaaacuuu

SEQ ID NO: 930 - RNA, 21 nt, Artificial
  synthetic
acgcccuuuuacuaaacuuga

SEQ ID NO: 931 - RNA, 21 nt, Artificial
  synthetic
cgcccuuuuacuaaacuugau

SEQ ID NO: 932 - RNA, 21 nt, Artificial
  synthetic
guuucaguaaauucuuaccgu

SEQ ID NO: 933 - RNA, 21 nt, Artificial
  synthetic
uuucaguaaauucuuaccguu

SEQ ID NO: 934 - RNA, 21 nt, Artificial
  synthetic
uucaguaaauucuuaccguca

SEQ ID NO: 935 - RNA, 21 nt, Artificial
  synthetic
ucaguaaauucuuaccgucaa

SEQ ID NO: 936 - RNA, 21 nt, Artificial
  synthetic
caguaaauucuuaccgucaaa

SEQ ID NO: 937 - RNA, 21 nt, Artificial
  synthetic
aguaaauucuuaccgucaaau

SEQ ID NO: 938 - RNA, 21 nt, Artificial
  synthetic
guaaauucuuaccgucaaacu

SEQ ID NO: 939 - RNA, 21 nt, Artificial
  synthetic
uaaauucuuaccgucaaacuu

SEQ ID NO: 940 - RNA, 21 nt, Artificial
  synthetic
aaauucuuaccgucaaacuga

SEQ ID NO: 941 - RNA, 21 nt, Artificial
  synthetic
aauucuuaccgucaaacugau

SEQ ID NO: 942 - RNA, 21 nt, Artificial
  synthetic
auucuuaccgucaaacugacu

SEQ ID NO: 943 - RNA, 21 nt, Artificial
  synthetic
uucuuaccgucaaacugacgu

SEQ ID NO: 944 - RNA, 21 nt, Artificial
  synthetic
ucuuaccgucaaacugacgga

SEQ ID NO: 945 - RNA, 21 nt, Artificial
  synthetic
cuuaccgucaaacugacggau

SEQ ID NO: 946 - RNA, 21 nt, Artificial
  synthetic
uuaccgucaaacugacggauu

SEQ ID NO: 947 - RNA, 21 nt, Artificial
  synthetic
uaccgucaaacugacggauua

SEQ ID NO: 948 - RNA, 21 nt, Artificial
  synthetic
accgucaaacugacggauuau

SEQ ID NO: 949 - RNA, 21 nt, Artificial
  synthetic
aacugacggauuauuauuuau

SEQ ID NO: 950 - RNA, 21 nt, Artificial
  synthetic
aguuugaugaggugaucacuu

SEQ ID NO: 951 - RNA, 21 nt, Artificial
  synthetic
acugucuacagugguucaacu

SEQ ID NO: 952 - RNA, 21 nt, Artificial
  synthetic
cugucuacagugguucaacuu

SEQ ID NO: 953 - RNA, 21 nt, Artificial
  synthetic
cuacagugguucaacuuuuaa

SEQ ID NO: 954 - RNA, 21 nt, Artificial
  synthetic
uacagugguucaacuuuuaau

SEQ ID NO: 955 - RNA, 21 nt, Artificial
  synthetic
ucaacuuuuaaguuaagggaa

SEQ ID NO: 956 - RNA, 21 nt, Artificial
  synthetic
aacuuuuaaguuaagggaaaa

SEQ ID NO: 957 - RNA, 21 nt, Artificial
  synthetic
aaaaacuuuuacuuuguagau

SEQ ID NO: 958 - RNA, 21 nt, Artificial
  synthetic
ccucagccuacgauuucuuuu

SEQ ID NO: 959 - RNA, 21 nt, Artificial
  synthetic
cucagccuacgauuucuuuug

SEQ ID NO: 960 - RNA, 21 nt, Artificial
  synthetic
ucagccuacgauuucuuuuga

SEQ ID NO: 961 - RNA, 21 nt, Artificial
  synthetic
gaggaugguucauauacuuau

SEQ ID NO: 962 - RNA, 21 nt, Artificial
  synthetic
aaugugaaguacaagugaaaa

SEQ ID NO: 963 - RNA, 21 nt, Artificial
  synthetic
aggaugguucauauacuuacu

SEQ ID NO: 964 - RNA, 21 nt, Artificial
  synthetic
gugaaguacaagugaaaaacu

SEQ ID NO: 965 - RNA, 21 nt, Artificial
  synthetic
aaggaguuuuuaaaacauaca

SEQ ID NO: 966 - RNA, 21 nt, Artificial
  synthetic
aggaguuuuuaaaacauacau

SEQ ID NO: 967 - RNA, 21 nt, Artificial
  synthetic
aaacauacaguccuaaguguu

SEQ ID NO: 968 - RNA, 21 nt, Artificial
  synthetic
aacauacaguccuaaguguga

SEQ ID NO: 969 - RNA, 21 nt, Artificial
  synthetic
acauacaguccuaagugugau

SEQ ID NO: 970 - RNA, 21 nt, Artificial
  synthetic
gcugcacaugagaaaaguaca

SEQ ID NO: 971 - RNA, 21 nt, Artificial
  synthetic
cugcacaugagaaaaguacau

SEQ ID NO: 972 - RNA, 21 nt, Artificial
  synthetic
auggagaguguuuuguucaaa

SEQ ID NO: 973 - RNA, 21 nt, Artificial
  synthetic
ggagaguguuuuguucaaauu

SEQ ID NO: 974 - RNA, 21 nt, Artificial
  synthetic
uuuguucaaaugcucagacuu

SEQ ID NO: 975 - RNA, 21 nt, Artificial
  synthetic
uguucaaaugcucagacuucu

SEQ ID NO: 976 - RNA, 21 nt, Artificial
  synthetic
guucaaaugcucagacuucgu

SEQ ID NO: 977 - RNA, 21 nt, Artificial
  synthetic
uucaaaugcucagacuucguu

SEQ ID NO: 978 - RNA, 21 nt, Artificial
  synthetic
ucaaaugcucagacuucguuu

SEQ ID NO: 979 - RNA, 21 nt, Artificial
  synthetic
caaaugcucagacuucguugu

SEQ ID NO: 980 - RNA, 21 nt, Artificial
  synthetic
aaaugcucagacuucguuguu

SEQ ID NO: 981 - RNA, 21 nt, Artificial
  synthetic
aaugcucagacuucguugugu

SEQ ID NO: 982 - RNA, 21 nt, Artificial
  synthetic
acauguuucgauauaaugaau

SEQ ID NO: 983 - RNA, 21 nt, Artificial
  synthetic
uuuaucuucauauacgguucu

SEQ ID NO: 984 - RNA, 21 nt, Artificial
  synthetic
agggacaacucagaagaauuu

SEQ ID NO: 985 - RNA, 21 nt, Artificial
  synthetic
gggacaacucagaagaauuuc

SEQ ID NO: 986 - RNA, 21 nt, Artificial
  synthetic
ggacaacucagaagaauuucu

SEQ ID NO: 987 - RNA, 21 nt, Artificial
  synthetic
gacaacucagaagaauuucuu

SEQ ID NO: 988 - RNA, 21 nt, Artificial
  synthetic
cuucucacacuucagauuuca

SEQ ID NO: 989 - RNA, 21 nt, Artificial
  synthetic
uucucacacuucagauuucaa

SEQ ID NO: 990 - RNA, 21 nt, Artificial
  synthetic
ucagaccaaagaguaguuaau

SEQ ID NO: 991 - RNA, 21 nt, Artificial
  synthetic
cagaccaaagaguaguuaauu

SEQ ID NO: 992 - RNA, 21 nt, Artificial
  synthetic
ugcuucucacacuucagauuu

SEQ ID NO: 993 - RNA, 21 nt, Artificial
  synthetic
gcuucucacacuucagauuuc

SEQ ID NO: 994 - RNA, 21 nt, Artificial
  synthetic
uagaauuuguaucccacaauu

SEQ ID NO: 995 - RNA, 21 nt, Artificial
  synthetic
agaauuuguaucccacaaucu

SEQ ID NO: 996 - RNA, 21 nt, Artificial
  synthetic
gaauuuguaucccacaauccu

SEQ ID NO: 997 - RNA, 21 nt, Artificial
  synthetic
gugaaacaucaccuagcuuuu

SEQ ID NO: 998 - RNA, 21 nt, Artificial
  synthetic
ugaaacaucaccuagcuuuuc

SEQ ID NO: 999 - RNA, 21 nt, Artificial
  synthetic
gaaacaucaccuagcuuuuca

SEQ ID NO: 1000 - RNA, 21 nt, Artificial
  synthetic
aaacaucaccuagcuuuucaa

SEQ ID NO: 1001 - RNA, 21 nt, Artificial
  synthetic
aacaucaccuagcuuuucaaa

SEQ ID NO: 1002 - RNA, 21 nt, Artificial
  synthetic
acaucaccuagcuuuucaaaa

SEQ ID NO: 1003 - RNA, 21 nt, Artificial
  synthetic
caucaccuagcuuuucaaaau

SEQ ID NO: 1004 - RNA, 21 nt, Artificial
  synthetic
aucaccuagcuuuucaaaagu

SEQ ID NO: 1005 - RNA, 21 nt, Artificial
  synthetic
ucaccuagcuuuucaaaagcu

SEQ ID NO: 1006 - RNA, 21 nt, Artificial
  synthetic
caccuagcuuuucaaaagcuu

SEQ ID NO: 1007 - RNA, 21 nt, Artificial
  synthetic
accuagcuuuucaaaagcuga

SEQ ID NO: 1008 - RNA, 21 nt, Artificial
  synthetic
ccuagcuuuucaaaagcugau

SEQ ID NO: 1009 - RNA, 21 nt, Artificial
  synthetic
ucugaaucuauggaucaacua

SEQ ID NO: 1010 - RNA, 21 nt, Artificial
  synthetic
cugaaucuauggaucaacuau

SEQ ID NO: 1011 - RNA, 21 nt, Artificial
  synthetic
caucugaaucuauggaucaau

SEQ ID NO: 1012 - RNA, 21 nt, Artificial
  synthetic
aucugaaucuauggaucaacu

SEQ ID NO: 1013 - RNA, 21 nt, Artificial
  synthetic
aucuauggaucaacuacuaau

SEQ ID NO: 1014 - RNA, 21 nt, Artificial
  synthetic
ucuauggaucaacuacuaagu

SEQ ID NO: 1015 - RNA, 21 nt, Artificial
  synthetic
cuauggaucaacuacuaagca

SEQ ID NO: 1016 - RNA, 21 nt, Artificial
  synthetic
uauggaucaacuacuaagcaa

SEQ ID NO: 1017 - RNA, 21 nt, Artificial
  synthetic
auggaucaacuacuaagcaaa

SEQ ID NO: 1018 - RNA, 21 nt, Artificial
  synthetic
uggaucaacuacuaagcaaaa

SEQ ID NO: 1019 - RNA, 21 nt, Artificial
  synthetic
ggaucaacuacuaagcaaaaa

SEQ ID NO: 1020 - RNA, 21 nt, Artificial
  synthetic
gaucaacuacuaagcaaaaau

SEQ ID NO: 1021 - RNA, 21 nt, Artificial
  synthetic
aaggagaaaagucacgagauu

SEQ ID NO: 1022 - RNA, 21 nt, Artificial
  synthetic
ggaguucaacccucguucuuu

SEQ ID NO: 1023 - RNA, 21 nt, Artificial
  synthetic
guucaacccucguucuuucuu

SEQ ID NO: 1024 - RNA, 21 nt, Artificial
  synthetic
uucaacccucguucuuucucu

SEQ ID NO: 1025 - RNA, 21 nt, Artificial
  synthetic
ucaacccucguucuuucucuu

SEQ ID NO: 1026 - RNA, 21 nt, Artificial
  synthetic
caacccucguucuuucucuca

SEQ ID NO: 1027 - RNA, 21 nt, Artificial
  synthetic
aacccucguucuuucucucau

SEQ ID NO: 1028 - RNA, 21 nt, Artificial
  synthetic
cguucuuucucucagccaaau

SEQ ID NO: 1029 - RNA, 21 nt, Artificial
  synthetic
guucuuucucucagccaaagu

SEQ ID NO: 1030 - RNA, 21 nt, Artificial
  synthetic
aguccugucauacaagguaau

SEQ ID NO: 1031 - RNA, 21 nt, Artificial
  synthetic
guccugucauacaagguaauu

SEQ ID NO: 1032 - RNA, 21 nt, Artificial
  synthetic
ugucauacaagguaaugccau

SEQ ID NO: 1033 - RNA, 21 nt, Artificial
  synthetic
gucauacaagguaaugccagu

SEQ ID NO: 1034 - RNA, 21 nt, Artificial
  synthetic
ucuacuuugccauuuccaccu

SEQ ID NO: 1035 - RNA, 21 nt, Artificial
  synthetic
aagcacagaaaacuagaacuu

SEQ ID NO: 1036 - RNA, 21 nt, Artificial
  synthetic
gcacagaaaacuagaacuuca

SEQ ID NO: 1037 - RNA, 21 nt, Artificial
  synthetic
acagaaaacuagaacuucauu

SEQ ID NO: 1038 - RNA, 21 nt, Artificial
  synthetic
cagaaaacuagaacuucauuu

SEQ ID NO: 1039 - RNA, 21 nt, Artificial
  synthetic
gaaacuggaaguuauuuauuu

SEQ ID NO: 1040 - RNA, 21 nt, Artificial
  synthetic
agucaugaacacaucagcuau

SEQ ID NO: 1041 - RNA, 21 nt, Artificial
  synthetic
gucaugaacacaucagcuagu

SEQ ID NO: 1042 - RNA, 21 nt, Artificial
  synthetic
ugcuugcugaaacuggaaguu

SEQ ID NO: 1043 - RNA, 21 nt, Artificial
  synthetic
cugaaacuggaaguuauuuau

SEQ ID NO: 1044 - RNA, 21 nt, Artificial
  synthetic
ugaaacuggaaguuauuuauu

SEQ ID NO: 1045 - RNA, 21 nt, Artificial
  synthetic
uugagagucaugaacacauca

SEQ ID NO: 1046 - RNA, 21 nt, Artificial
  synthetic
augaacacaucagcuagcaau

SEQ ID NO: 1047 - RNA, 21 nt, Artificial
  synthetic
agaaguaacaagagugauucu

SEQ ID NO: 1048 - RNA, 21 nt, Artificial
  synthetic
ugaacacaucagcuagcaaca

SEQ ID NO: 1049 - RNA, 21 nt, Artificial
  synthetic
aucagcuagcaacagaaguaa

SEQ ID NO: 1050 - RNA, 21 nt, Artificial
  synthetic
cagcuagcaacagaaguaaca

SEQ ID NO: 1051 - RNA, 21 nt, Artificial
  synthetic
cuagcaacagaaguaacaaga

SEQ ID NO: 1052 - RNA, 21 nt, Artificial
  synthetic
uagcaacagaaguaacaagau

SEQ ID NO: 1053 - RNA, 21 nt, Artificial
  synthetic
cuugcugcuauuaccgcuuua

SEQ ID NO: 1054 - RNA, 21 nt, Artificial
  synthetic
gcugcuauuaccgcuuuaaaa

SEQ ID NO: 1055 - RNA, 21 nt, Artificial
  synthetic
cccuuuuacuaaacuugacau

SEQ ID NO: 1056 - RNA, 21 nt, Artificial
  synthetic
cuuuuacuaaacuugacagaa

SEQ ID NO: 1057 - RNA, 21 nt, Artificial
  synthetic
uuuuacuaaacuugacagaau

SEQ ID NO: 1058 - RNA, 21 nt, Artificial
  synthetic
uacuaaacuugacagaaguuu

SEQ ID NO: 1059 - RNA, 21 nt, Artificial
  synthetic
cuaaacuugacagaaguucau

SEQ ID NO: 1060 - RNA, 21 nt, Artificial
  synthetic
acuugacagaaguucaguaaa

SEQ ID NO: 1061 - RNA, 21 nt, Artificial
  synthetic
ugacagaaguucaguaaauuu

SEQ ID NO: 1062 - RNA, 21 nt, Artificial
  synthetic
acagaaguucaguaaauucuu

SEQ ID NO: 1063 - RNA, 21 nt, Artificial
  synthetic
cagaaguucaguaaauucuua

SEQ ID NO: 1064 - RNA, 21 nt, Artificial
  synthetic
agaaguucaguaaauucuuau

SEQ ID NO: 1065 - RNA, 21 nt, Artificial
  synthetic
ccaaacugacggauuauuauu

SEQ ID NO: 1066 - RNA, 21 nt, Artificial
  synthetic
aaaacuuuuacuuuguagaua

SEQ ID NO: 1067 - RNA, 21 nt, Artificial
  synthetic
guuaagggaaaacuuuuacuu

SEQ ID NO: 1068 - RNA, 21 nt, Artificial
  synthetic
uuaagggaaaacuuuuacuuu

SEQ ID NO: 1069 - RNA, 21 nt, Artificial
  synthetic
uaagggaaaacuuuuacuuug

SEQ ID NO: 1070 - RNA, 21 nt, Artificial
  synthetic
agggaaaacuuuuacuuugua

SEQ ID NO: 1071 - RNA, 21 nt, Artificial
  synthetic
gggaaaacuuuuacuuuguau

SEQ ID NO: 1072 - RNA, 21 nt, Artificial
  synthetic
gaaaacuuuuacuuuguagau

SEQ ID NO: 1073 - RNA, 21 nt, Artificial
  synthetic
uccgacuuccgguaaagaguu

SEQ ID NO: 1074 - RNA, 21 nt, Artificial
  synthetic
ccgacuuccgguaaagagucu

SEQ ID NO: 1075 - RNA, 21 nt, Artificial
  synthetic
cgacuuccgguaaagaguccu

SEQ ID NO: 1076 - RNA, 21 nt, Artificial
  synthetic
aaugugaaguacaagugaaaa

SEQ ID NO: 1077 - RNA, 21 nt, Artificial
  synthetic
augugaaguacaagugaaaaa

SEQ ID NO: 1078 - RNA, 21 nt, Artificial
  synthetic
caugagaaaaguacagaaucu

SEQ ID NO: 1079 - RNA, 21 nt, Artificial
  synthetic
cacuucucacacuucagauuu

SEQ ID NO: 1080 - RNA, 21 nt, Artificial
  synthetic
acuucucacacuucagauuuc

SEQ ID NO: 1081 - RNA, 21 nt, Artificial
  synthetic
cuucucacacuucagauuuca

SEQ ID NO: 1082 - RNA, 21 nt, Artificial
  synthetic
uucucacacuucagauuucaa

SEQ ID NO: 1083 - DNA, 23 bp, Artificial
  synthetic
aacucutuaccggaagucggagg

SEQ ID NO: 1084 - DNA, 23 bp, Artificial
  synthetic
agacuctuuaccggaagucggag

SEQ ID NO: 1085 - RNA, 23 nt, Artificial
  synthetic
aggacucuuuaccggaagucgga

SEQ ID NO: 1086 - RNA, 23 nt, Artificial
  synthetic
uuuucacuuguacuucacauuug

SEQ ID NO: 1087 - RNA, 23 nt, Artificial
  synthetic
uuuuucacuuguacuucacauuu

SEQ ID NO: 1088 - DNA, 23 bp, Artificial
  synthetic
agauuctguacuuuucucaugug

SEQ ID NO: 1089 - RNA, 23 nt, Artificial
  synthetic
aaaucugaagugugagaagugga

SEQ ID NO: 1090 - DNA, 23 bp, Artificial
  synthetic
gaaauctgaagugugagaagugg

SEQ ID NO: 1091 - RNA, 23 nt, Artificial
  synthetic
ugaaaucugaagugugagaagug

SEQ ID NO: 1092 - DNA, 23 bp, Artificial
  synthetic
uugaaatcugaagugugagaagu

SEQ ID NO: 1093 - RNA, 23 nt, Artificial
  synthetic
auugaaaucugaagugugagaag

SEQ ID NO: 1094 - RNA, 23 nt, Artificial
  synthetic
aguugaaaucugaagugugagaa

SEQ ID NO: 1095 - RNA, 23 nt, Artificial
  synthetic
agguugaaaucugaagugugaga

SEQ ID NO: 1096 - RNA, 23 nt, Artificial
  synthetic
aggguugaaaucugaagugugag

SEQ ID NO: 1097 - RNA, 23 nt, Artificial
  synthetic
auucggguugaaaucugaagugu

SEQ ID NO: 1098 - DNA, 23 bp, Artificial
  synthetic
auuaactacucuuuggucugaac

SEQ ID NO: 1099 - RNA, 23 nt, Artificial
  synthetic
aauuaacuacucuuuggucugaa

SEQ ID NO: 1100 - DNA, 23 bp, Artificial
  synthetic
augcgutuaggcauaguagagac

SEQ ID NO: 1101 - DNA, 23 bp, Artificial
  synthetic
aaugcgtuuaggcauaguagaga

SEQ ID NO: 1102 - RNA, 23 nt, Artificial
  synthetic
aacaugcguuuaggcauaguaga

SEQ ID NO: 1103 - RNA, 23 nt, Artificial
  synthetic
auugauccauagauucagaagua

SEQ ID NO: 1104 - DNA, 23 bp, Artificial
  synthetic
aguugatccauagauucagaagu

SEQ ID NO: 1105 - RNA, 23 nt, Artificial
  synthetic
uaguugauccauagauucagaag

SEQ ID NO: 1106 - RNA, 23 nt, Artificial
  synthetic
auaguugauccauagauucagaa

SEQ ID NO: 1107 - DNA, 23 bp, Artificial
  synthetic
aguagutgauccauagauucaga

SEQ ID NO: 1108 - DNA, 23 bp, Artificial
  synthetic
uaguagtugauccauagauucag

SEQ ID NO: 1109 - RNA, 23 nt, Artificial
  synthetic
uuaguaguugauccauagauuca

SEQ ID NO: 1110 - RNA, 23 nt, Artificial
  synthetic
uuuaguaguugauccauagauuc

SEQ ID NO: 1111 - DNA, 23 bp, Artificial
  synthetic
acgucatagguauuggguauaaa

SEQ ID NO: 1112 - RNA, 23 nt, Artificial
  synthetic
uuugguacugcucuauaugucuu

SEQ ID NO: 1113 - RNA, 23 nt, Artificial
  synthetic
auauuugguacugcucuauaugu

SEQ ID NO: 1114 - DNA, 23 bp, Artificial
  synthetic
aauauutgguacugcucuauaug

SEQ ID NO: 1115 - DNA, 23 bp, Artificial
  synthetic
acauautugguacugcucuauau

SEQ ID NO: 1116 - RNA, 23 nt, Artificial
  synthetic
aggcauauuugguacugcucuau

SEQ ID NO: 1117 - DNA, 23 bp, Artificial
  synthetic
auuguatgguaauuugggacaug

SEQ ID NO: 1118 - DNA, 23 bp, Artificial
  synthetic
uuguugtaugguaauuugggaca

SEQ ID NO: 1119 - DNA, 23 bp, Artificial
  synthetic
acaaagtagaaagaagggcuugu

SEQ ID NO: 1120 - RNA, 23 nt, Artificial
  synthetic
auggcaaaguagaaagaagggcu

SEQ ID NO: 1121 - RNA, 23 nt, Artificial
  synthetic
aauggcaaaguagaaagaagggc

SEQ ID NO: 1122 - RNA, 23 nt, Artificial
  synthetic
aaauggcaaaguagaaagaaggg

SEQ ID NO: 1123 - RNA, 23 nt, Artificial
  synthetic
gaaauggcaaaguagaaagaagg

SEQ ID NO: 1124 - RNA, 23 nt, Artificial
  synthetic
agaaauggcaaaguagaaagaag

SEQ ID NO: 1125 - DNA, 23 bp, Artificial
  synthetic
uggaaatggcaaaguagaaagaa

SEQ ID NO: 1126 - RNA, 23 nt, Artificial
  synthetic
auggaaauggcaaaguagaaaga

SEQ ID NO: 1127 - RNA, 23 nt, Artificial
  synthetic
aguggaaauggcaaaguagaaag

SEQ ID NO: 1128 - DNA, 23 bp, Artificial
  synthetic
aaccautccugacuguacaugag

SEQ ID NO: 1129 - DNA, 23 bp, Artificial
  synthetic
aaaccatuccugacuguacauga

SEQ ID NO: 1130 - RNA, 23 nt, Artificial
  synthetic
agaaccauuccugacuguacaug

SEQ ID NO: 1131 - RNA, 23 nt, Artificial
  synthetic
aaugagaaggaaccauuccugac

SEQ ID NO: 1132 - RNA, 23 nt, Artificial
  synthetic
uuggaugagaaggaaccauuccu

SEQ ID NO: 1133 - RNA, 23 nt, Artificial
  synthetic
aguuggaugagaaggaaccauuc

SEQ ID NO: 1134 - RNA, 23 nt, Artificial
  synthetic
aaguuggaugagaaggaaccauu

SEQ ID NO: 1135 - DNA, 23 bp, Artificial
  synthetic
agcagutggaugagaaggaacca

SEQ ID NO: 1136 - RNA, 23 nt, Artificial
  synthetic
aauuagcaucauuggcgcauggg

SEQ ID NO: 1137 - DNA, 23 bp, Artificial
  synthetic
agucautagcaucauuggcgcau

SEQ ID NO: 1138 - RNA, 23 nt, Artificial
  synthetic
aucgucauuagcaucauuggcgc

SEQ ID NO: 1139 - RNA, 23 nt, Artificial
  synthetic
ugucgucauuagcaucauuggcg

SEQ ID NO: 1140 - RNA, 23 nt, Artificial
  synthetic
augugucgucauuagcaucauug

SEQ ID NO: 1141 - DNA, 23 bp, Artificial
  synthetic
acugugtcgucauuagcaucauu

SEQ ID NO: 1142 - RNA, 23 nt, Artificial
  synthetic
agcuguagugcacuuugagcgag

SEQ ID NO: 1143 - RNA, 23 nt, Artificial
  synthetic
uugucgagacuggaaugggcugu

SEQ ID NO: 1144 - RNA, 23 nt, Artificial
  synthetic
uguugucgagacuggaaugggcu

SEQ ID NO: 1145 - RNA, 23 nt, Artificial
  synthetic
uuacaacugcuguuggugguggg

SEQ ID NO: 1146 - RNA, 23 nt, Artificial
  synthetic
auuacaacugcuguugguggugg

SEQ ID NO: 1147 - RNA, 23 nt, Artificial
  synthetic
acuuacaacugcuguugguggug

SEQ ID NO: 1148 - RNA, 23 nt, Artificial
  synthetic
agccuuacaacugcuguuggugg

SEQ ID NO: 1149 - DNA, 23 bp, Artificial
  synthetic
acagcctuacaacugcuguuggu

SEQ ID NO: 1150 - DNA, 23 bp, Artificial
  synthetic
aguuggtagaagcaguagaaggg

SEQ ID NO: 1151 - RNA, 23 nt, Artificial
  synthetic
acaguugguagaagcaguagaag

SEQ ID NO: 1152 - DNA, 23 bp, Artificial
  synthetic
uccagutgguagaagcaguagaa

SEQ ID NO: 1153 - RNA, 23 nt, Artificial
  synthetic
acuuccaguugguagaagcagua

SEQ ID NO: 1154 - RNA, 23 nt, Artificial
  synthetic
aguuuucugugcuuccaguuggu

SEQ ID NO: 1155 - RNA, 23 nt, Artificial
  synthetic
uuggauguuacaagaaaucaaca

SEQ ID NO: 1156 - RNA, 23 nt, Artificial
  synthetic
auauuggauguuacaagaaauca

SEQ ID NO: 1157 - DNA, 23 bp, Artificial
  synthetic
uccuautggauguuacaagaaau

SEQ ID NO: 1158 - DNA, 23 bp, Artificial
  synthetic
uuccuatuggauguuacaagaaa

SEQ ID NO: 1159 - RNA, 23 nt, Artificial
  synthetic
acauuccuauuggauguuacaag

SEQ ID NO: 1160 - DNA, 23 bp, Artificial
  synthetic
uagcautccuauuggauguuaca

SEQ ID NO: 1161 - DNA, 23 bp, Artificial
  synthetic
uuagcatuccuauuggauguuac

SEQ ID NO: 1162 - RNA, 23 nt, Artificial
  synthetic
auuagcauuccuauuggauguua

SEQ ID NO: 1163 - RNA, 23 nt, Artificial
  synthetic
uguuagcauuccuauuggauguu

SEQ ID NO: 1164 - RNA, 23 nt, Artificial
  synthetic
ugaacuguuagcauuccuauugg

SEQ ID NO: 1165 - DNA, 23 bp, Artificial
  synthetic
augaactguuagcauuccuauug

SEQ ID NO: 1166 - RNA, 23 nt, Artificial
  synthetic
agugaacuguuagcauuccuauu

SEQ ID NO: 1167 - RNA, 23 nt, Artificial
  synthetic
aagugaacuguuagcauuccuau

SEQ ID NO: 1168 - RNA, 23 nt, Artificial
  synthetic
aaagugaacuguuagcauuccua

SEQ ID NO: 1169 - RNA, 23 nt, Artificial
  synthetic
acaagugaacuguuagcauuccu

SEQ ID NO: 1170 - RNA, 23 nt, Artificial
  synthetic
aacugcaagugaacuguuagcau

SEQ ID NO: 1171 - RNA, 23 nt, Artificial
  synthetic
ucuuccacugcaagugaacuguu

SEQ ID NO: 1172 - DNA, 23 bp, Artificial
  synthetic
acuaaatgccucuacucggucca

SEQ ID NO: 1173 - RNA, 23 nt, Artificial
  synthetic
uccuaaaugccucuacucggucc

SEQ ID NO: 1174 - RNA, 23 nt, Artificial
  synthetic
auauggaauuauggaauagcccc

SEQ ID NO: 1175 - RNA, 23 nt, Artificial
  synthetic
aaauaacuuccaguuucggcaag

SEQ ID NO: 1176 - RNA, 23 nt, Artificial
  synthetic
auaaauaacuuccaguuucggca

SEQ ID NO: 1177 - DNA, 23 bp, Artificial
  synthetic
aauaaataacuuccaguuucggc

SEQ ID NO: 1178 - RNA, 23 nt, Artificial
  synthetic
aaauaaauaacuuccaguuucgg

SEQ ID NO: 1179 - RNA, 23 nt, Artificial
  synthetic
aaaauaaauaacuuccaguuucg

SEQ ID NO: 1180 - DNA, 23 bp, Artificial
  synthetic
aaugactuucaaggguuauuaaa

SEQ ID NO: 1181 - RNA, 23 nt, Artificial
  synthetic
ucaugacuuucaaggguuauuaa

SEQ ID NO: 1182 - DNA, 23 bp, Artificial
  synthetic
uguucatgacuuucaaggguuau

SEQ ID NO: 1183 - DNA, 23 bp, Artificial
  synthetic
aaugugtucaugacuuucaaggg

SEQ ID NO: 1184 - RNA, 23 nt, Artificial
  synthetic
auagcugauguguucaugacuuu

SEQ ID NO: 1185 - DNA, 23 bp, Artificial
  synthetic
acuagctgauguguucaugacuu

SEQ ID NO: 1186 - RNA, 23 nt, Artificial
  synthetic
ugcuagcugauguguucaugacu

SEQ ID NO: 1187 - RNA, 23 nt, Artificial
  synthetic
uugcuagcugauguguucaugac

SEQ ID NO: 1188 - RNA, 23 nt, Artificial
  synthetic
uuugcuagcugauguguucauga

SEQ ID NO: 1189 - RNA, 23 nt, Artificial
  synthetic
uuugcuagcugauguguucauga

SEQ ID NO: 1190 - DNA, 23 bp, Artificial
  synthetic
uuuugctagcugauguguucaug

SEQ ID NO: 1191 - RNA, 23 nt, Artificial
  synthetic
auuuugcuagcugauguguucau

SEQ ID NO: 1192 - RNA, 23 nt, Artificial
  synthetic
ucuuuugcuagcugauguguuca

SEQ ID NO: 1193 - DNA, 23 bp, Artificial
  synthetic
uacuuctuuugcuagcugaugug

SEQ ID NO: 1194 - DNA, 23 bp, Artificial
  synthetic
ucuugutacuucuuuugcuagcu

SEQ ID NO: 1195 - RNA, 23 nt, Artificial
  synthetic
agcaagaaucacucuuguuacuu

SEQ ID NO: 1196 - RNA, 23 nt, Artificial
  synthetic
aagcaagaaucacucuuguuacu

SEQ ID NO: 1197 - RNA, 23 nt, Artificial
  synthetic
acagcaagaaucacucuuguuac

SEQ ID NO: 1198 - RNA, 23 nt, Artificial
  synthetic
aauagcagcaagaaucacucuug

SEQ ID NO: 1199 - RNA, 23 nt, Artificial
  synthetic
uaauagcagcaagaaucacucuu

SEQ ID NO: 1200 - RNA, 23 nt, Artificial
  synthetic
aguaauagcagcaagaaucacuc

SEQ ID NO: 1201 - RNA, 23 nt, Artificial
  synthetic
uuuaguaaaagggcguuccaagu

SEQ ID NO: 1202 - DNA, 23 bp, Artificial
  synthetic
auuuagtaaaagggcguuccaag

SEQ ID NO: 1203 - RNA, 23 nt, Artificial
  synthetic
aaguuuaguaaaagggcguucca

SEQ ID NO: 1204 - DNA, 23 bp, Artificial
  synthetic
aaaguutaguaaaagggcguucc

SEQ ID NO: 1205 - DNA, 23 bp, Artificial
  synthetic
ucaagutuaguaaaagggcguuc

SEQ ID NO: 1206 - DNA, 23 bp, Artificial
  synthetic
aucaagtuuaguaaaagggcguu

SEQ ID NO: 1207 - RNA, 23 nt, Artificial
  synthetic
acgguaagaauuuacugaaacuu

SEQ ID NO: 1208 - RNA, 23 nt, Artificial
  synthetic
aacgguaagaauuuacugaaacu

SEQ ID NO: 1209 - DNA, 23 bp, Artificial
  synthetic
ugacggtaagaauuuacugaaac

SEQ ID NO: 1210 - RNA, 23 nt, Artificial
  synthetic
uugacgguaagaauuuacugaaa

SEQ ID NO: 1211 - RNA, 23 nt, Artificial
  synthetic
uuugacgguaagaauuuacugaa

SEQ ID NO: 1212 - RNA, 23 nt, Artificial
  synthetic
auuugacgguaagaauuuacuga

SEQ ID NO: 1213 - RNA, 23 nt, Artificial
  synthetic
aguuugacgguaagaauuuacug

SEQ ID NO: 1214 - RNA, 23 nt, Artificial
  synthetic
aaguuugacgguaagaauuuacu

SEQ ID NO: 1215 - DNA, 23 bp, Artificial
  synthetic
ucaguutgacgguaagaauuuac

SEQ ID NO: 1216 - DNA, 23 bp, Artificial
  synthetic
aucagutugacgguaagaauuua

SEQ ID NO: 1217 - DNA, 23 bp, Artificial
  synthetic
agucagtuugacgguaagaauuu

SEQ ID NO: 1218 - RNA, 23 nt, Artificial
  synthetic
acgucaguuugacgguaagaauu

SEQ ID NO: 1219 - RNA, 23 nt, Artificial
  synthetic
uccgucaguuugacgguaagaau

SEQ ID NO: 1220 - RNA, 23 nt, Artificial
  synthetic
auccgucaguuugacgguaagaa

SEQ ID NO: 1221 - DNA, 23 bp, Artificial
  synthetic
aauccgtcaguuugacgguaaga

SEQ ID NO: 1222 - RNA, 23 nt, Artificial
  synthetic
uaauccgucaguuugacgguaag

SEQ ID NO: 1223 - RNA, 23 nt, Artificial
  synthetic
auaauccgucaguuugacgguaa

SEQ ID NO: 1224 - RNA, 23 nt, Artificial
  synthetic
auaaauaauaauccgucaguuug

SEQ ID NO: 1225 - DNA, 23 bp, Artificial
  synthetic
aagugatcaccucaucaaacuug

SEQ ID NO: 1226 - RNA, 23 nt, Artificial
  synthetic
aguugaaccacuguagacaguga

SEQ ID NO: 1227 - RNA, 23 nt, Artificial
  synthetic
aaguugaaccacuguagacagug

SEQ ID NO: 1228 - RNA, 23 nt, Artificial
  synthetic
uuaaaaguugaaccacuguagac

SEQ ID NO: 1229 - RNA, 23 nt, Artificial
  synthetic
auuaaaaguugaaccacuguaga

SEQ ID NO: 1230 - DNA, 23 bp, Artificial
  synthetic
uucccutaacuuaaaaguugaac

SEQ ID NO: 1231 - RNA, 23 nt, Artificial
  synthetic
uuuucccuuaacuuaaaaguuga

SEQ ID NO: 1232 - RNA, 23 nt, Artificial
  synthetic
aucuacaaaguaaaaguuuuucc

SEQ ID NO: 1233 - RNA, 23 nt, Artificial
  synthetic
aaaagaaaucguaggcugaggca

SEQ ID NO: 1234 - RNA, 23 nt, Artificial
  synthetic
caaaagaaaucguaggcugaggc

SEQ ID NO: 1235 - RNA, 23 nt, Artificial
  synthetic
ucaaaagaaaucguaggcugagg

SEQ ID NO: 1236 - RNA, 23 nt, Artificial
  synthetic
auaaguauaugaaccauccucac

SEQ ID NO: 1237 - RNA, 23 nt, Artificial
  synthetic
uuuucacuuguacuucacauuuc

SEQ ID NO: 1238 - DNA, 23 bp, Artificial
  synthetic
aguaagtauaugaaccauccuca

SEQ ID NO: 1239 - DNA, 23 bp, Artificial
  synthetic
aguuuutcacuuguacuucacau

SEQ ID NO: 1240 - DNA, 23 bp, Artificial
  synthetic
uguaugtuuuaaaaacuccuuca

SEQ ID NO: 1241 - RNA, 23 nt, Artificial
  synthetic
auguauguuuuaaaaacuccuuc

SEQ ID NO: 1242 - DNA, 23 bp, Artificial
  synthetic
aacacutaggacuguauguuuua

SEQ ID NO: 1243 - DNA, 23 bp, Artificial
  synthetic
ucacactuaggacuguauguuuu

SEQ ID NO: 1244 - RNA, 23 nt, Artificial
  synthetic
aucacacuuaggacuguauguuu

SEQ ID NO: 1245 - DNA, 23 bp, Artificial
  synthetic
uguacutuucucaugugcagcau

SEQ ID NO: 1246 - DNA, 23 bp, Artificial
  synthetic
auguactuuucucaugugcagca

SEQ ID NO: 1247 - RNA, 23 nt, Artificial
  synthetic
uuugaacaaaacacucuccauua

SEQ ID NO: 1248 - RNA, 23 nt, Artificial
  synthetic
aauuugaacaaaacacucuccau

SEQ ID NO: 1249 - RNA, 23 nt, Artificial
  synthetic
aagucugagcauuugaacaaaac

SEQ ID NO: 1250 - RNA, 23 nt, Artificial
  synthetic
agaagucugagcauuugaacaaa

SEQ ID NO: 1251 - DNA, 23 bp, Artificial
  synthetic
acgaagtcugagcauuugaacaa

SEQ ID NO: 1252 - RNA, 23 nt, Artificial
  synthetic
aacgaagucugagcauuugaaca

SEQ ID NO: 1253 - RNA, 23 nt, Artificial
  synthetic
aaacgaagucugagcauuugaac

SEQ ID NO: 1254 - RNA, 23 nt, Artificial
  synthetic
acaacgaagucugagcauuugaa

SEQ ID NO: 1255 - RNA, 23 nt, Artificial
  synthetic
aacaacgaagucugagcauuuga

SEQ ID NO: 1256 - RNA, 23 nt, Artificial
  synthetic
acacaacgaagucugagcauuug

SEQ ID NO: 1257 - DNA, 23 bp, Artificial
  synthetic
auucautauaucgaaacauguca

SEQ ID NO: 1258 - RNA, 23 nt, Artificial
  synthetic
agaaccguauaugaagauaaacu

SEQ ID NO: 1259 - DNA, 23 bp, Artificial
  synthetic
aaauuctucugaguugucccuuu

SEQ ID NO: 1260 - RNA, 23 nt, Artificial
  synthetic
gaaauucuucugaguugucccuu

SEQ ID NO: 1261 - DNA, 23 bp, Artificial
  synthetic
agaaautcuucugaguugucccu

SEQ ID NO: 1262 - DNA, 23 bp, Artificial
  synthetic
aagaaatucuucugaguuguccc

SEQ ID NO: 1263 - RNA, 23 nt, Artificial
  synthetic
ugaaaucugaagugugagaagca

SEQ ID NO: 1264 - DNA, 23 bp, Artificial
  synthetic
uugaaatcugaagugugagaagc

SEQ ID NO: 1265 - DNA, 23 bp, Artificial
  synthetic
auuaactacucuuuggucugagc

SEQ ID NO: 1266 - RNA, 23 nt, Artificial
  synthetic
aauuaacuacucuuuggucugag

SEQ ID NO: 1267 - RNA, 23 nt, Artificial
  synthetic
aaaucugaagugugagaagcagc

SEQ ID NO: 1268 - DNA, 23 bp, Artificial
  synthetic
gaaauctgaagugugagaagcag

SEQ ID NO: 1269 - RNA, 23 nt, Artificial
  synthetic
aauugugggauacaaauucuagg

SEQ ID NO: 1270 - DNA, 23 bp, Artificial
  synthetic
agauugtgggauacaaauucuag

SEQ ID NO: 1271 - RNA, 23 nt, Artificial
  synthetic
aggauugugggauacaaauucua

SEQ ID NO: 1272 - DNA, 23 bp, Artificial
  synthetic
aaaagctaggugauguuucacuu

SEQ ID NO: 1273 - RNA, 23 nt, Artificial
  synthetic
gaaaagcuaggugauguuucacu

SEQ ID NO: 1274 - RNA, 23 nt, Artificial
  synthetic
ugaaaagcuaggugauguuucac

SEQ ID NO: 1275 - RNA, 23 nt, Artificial
  synthetic
uugaaaagcuaggugauguuuca

SEQ ID NO: 1276 - RNA, 23 nt, Artificial
  synthetic
uuugaaaagcuaggugauguuuc

SEQ ID NO: 1277 - RNA, 23 nt, Artificial
  synthetic
uuuugaaaagcuaggugauguuu

SEQ ID NO: 1278 - RNA, 23 nt, Artificial
  synthetic
auuuugaaaagcuaggugauguu

SEQ ID NO: 1279 - RNA, 23 nt, Artificial
  synthetic
acuuuugaaaagcuaggugaugu

SEQ ID NO: 1280 - DNA, 23 bp, Artificial
  synthetic
agcuuutgaaaagcuaggugaug

SEQ ID NO: 1281 - DNA, 23 bp, Artificial
  synthetic
aagcuutugaaaagcuaggugau

SEQ ID NO: 1282 - DNA, 23 bp, Artificial
  synthetic
ucagcutuugaaaagcuagguga

SEQ ID NO: 1283 - DNA, 23 bp, Artificial
  synthetic
aucagctuuugaaaagcuaggug

SEQ ID NO: 1284 - RNA, 23 nt, Artificial
  synthetic
uaguugauccauagauucagaug

SEQ ID NO: 1285 - RNA, 23 nt, Artificial
  synthetic
auaguugauccauagauucagau

SEQ ID NO: 1286 - RNA, 23 nt, Artificial
  synthetic
auugauccauagauucagaugua

SEQ ID NO: 1287 - DNA, 23 bp, Artificial
  synthetic
aguugatccauagauucagaugu

SEQ ID NO: 1288 - RNA, 23 nt, Artificial
  synthetic
auuaguaguugauccauagauuc

SEQ ID NO: 1289 - DNA, 23 bp, Artificial
  synthetic
acuuagtaguugauccauagauu

SEQ ID NO: 1290 - RNA, 23 nt, Artificial
  synthetic
ugcuuaguaguugauccauagau

SEQ ID NO: 1291 - RNA, 23 nt, Artificial
  synthetic
uugcuuaguaguugauccauaga

SEQ ID NO: 1292 - DNA, 23 bp, Artificial
  synthetic
uuugcutaguaguugauccauag

SEQ ID NO: 1293 - DNA, 23 bp, Artificial
  synthetic
uuuugctuaguaguugauccaua

SEQ ID NO: 1294 - RNA, 23 nt, Artificial
  synthetic
uuuuugcuuaguaguugauccau

SEQ ID NO: 1295 - RNA, 23 nt, Artificial
  synthetic
auuuuugcuuaguaguugaucca

SEQ ID NO: 1296 - RNA, 23 nt, Artificial
  synthetic
aaucucgugacuuuucuccuucu

SEQ ID NO: 1297 - RNA, 23 nt, Artificial
  synthetic
aaagaacgaggguugaacuccuu

SEQ ID NO: 1298 - RNA, 23 nt, Artificial
  synthetic
aagaaagaacgaggguugaacuc

SEQ ID NO: 1299 - RNA, 23 nt, Artificial
  synthetic
agagaaagaacgaggguugaacu

SEQ ID NO: 1300 - RNA, 23 nt, Artificial
  synthetic
aagagaaagaacgaggguugaac

SEQ ID NO: 1301 - RNA, 23 nt, Artificial
  synthetic
ugagagaaagaacgaggguugaa

SEQ ID NO: 1302 - RNA, 23 nt, Artificial
  synthetic
augagagaaagaacgaggguuga

SEQ ID NO: 1303 - RNA, 23 nt, Artificial
  synthetic
auuuggcugagagaaagaacgag

SEQ ID NO: 1304 - RNA, 23 nt, Artificial
  synthetic
acuuuggcugagagaaagaacga

SEQ ID NO: 1305 - DNA, 23 bp, Artificial
  synthetic
auuacctuguaugacaggacugu

SEQ ID NO: 1306 - RNA, 23 nt, Artificial
  synthetic
aauuaccuuguaugacaggacug

SEQ ID NO: 1307 - DNA, 23 bp, Artificial
  synthetic
auggcatuaccuuguaugacagg

SEQ ID NO: 1308 - RNA, 23 nt, Artificial
  synthetic
acuggcauuaccuuguaugacag

SEQ ID NO: 1309 - RNA, 23 nt, Artificial
  synthetic
agguggaaauggcaaaguagaaa

SEQ ID NO: 1310 - DNA, 23 bp, Artificial
  synthetic
aaguuctaguuuucugugcuucc

SEQ ID NO: 1311 - DNA, 23 bp, Artificial
  synthetic
ugaagutcuaguuuucugugcuu

SEQ ID NO: 1312 - RNA, 23 nt, Artificial
  synthetic
aaugaaguucuaguuuucugugc

SEQ ID NO: 1313 - RNA, 23 nt, Artificial
  synthetic
aaaugaaguucuaguuuucugug

SEQ ID NO: 1314 - RNA, 23 nt, Artificial
  synthetic
aaauaaauaacuuccaguuucag

SEQ ID NO: 1315 - RNA, 23 nt, Artificial
  synthetic
auagcugauguguucaugacucu

SEQ ID NO: 1316 - DNA, 23 bp, Artificial
  synthetic
acuagctgauguguucaugacuc

SEQ ID NO: 1317 - RNA, 23 nt, Artificial
  synthetic
aacuuccaguuucagcaagcaga

SEQ ID NO: 1318 - RNA, 23 nt, Artificial
  synthetic
auaaauaacuuccaguuucagca

SEQ ID NO: 1319 - DNA, 23 bp, Artificial
  synthetic
aauaaataacuuccaguuucagc

SEQ ID NO: 1320 - RNA, 23 nt, Artificial
  synthetic
ugauguguucaugacucucaagg

SEQ ID NO: 1321 - RNA, 23 nt, Artificial
  synthetic
auugcuagcugauguguucauga

SEQ ID NO: 1322 - RNA, 23 nt, Artificial
  synthetic
agaaucacucuuguuacuucugu

SEQ ID NO: 1323 - DNA, 23 bp, Artificial
  synthetic
uguugctagcugauguguucaug

SEQ ID NO: 1324 - RNA, 23 nt, Artificial
  synthetic
uuacuucuguugcuagcugaugu

SEQ ID NO: 1325 - DNA, 23 bp, Artificial
  synthetic
uguuactucuguugcuagcugau

SEQ ID NO: 1326 - DNA, 23 bp, Artificial
  synthetic
ucuugutacuucuguugcuagcu

SEQ ID NO: 1327 - DNA, 23 bp, Artificial
  synthetic
aucuugtuacuucuguugcuagc

SEQ ID NO: 1328 - RNA, 23 nt, Artificial
  synthetic
uaaagcgguaauagcagcaagaa

SEQ ID NO: 1329 - RNA, 23 nt, Artificial
  synthetic
uuuuaaagcgguaauagcagcaa

SEQ ID NO: 1330 - RNA, 23 nt, Artificial
  synthetic
augucaaguuuaguaaaagggcg

SEQ ID NO: 1331 - RNA, 23 nt, Artificial
  synthetic
uucugucaaguuuaguaaaaggg

SEQ ID NO: 1332 - DNA, 23 bp, Artificial
  synthetic
auucugtcaaguuuaguaaaagg

SEQ ID NO: 1333 - RNA, 23 nt, Artificial
  synthetic
aaacuucugucaaguuuaguaaa

SEQ ID NO: 1334 - DNA, 23 bp, Artificial
  synthetic
augaactucugucaaguuuagua

SEQ ID NO: 1335 - RNA, 23 nt, Artificial
  synthetic
uuuacugaacuucugucaaguuu

SEQ ID NO: 1336 - RNA, 23 nt, Artificial
  synthetic
aaauuuacugaacuucugucaag

SEQ ID NO: 1337 - DNA, 23 bp, Artificial
  synthetic
aagaautuacugaacuucuguca

SEQ ID NO: 1338 - DNA, 23 bp, Artificial
  synthetic
uaagaatuuacugaacuucuguc

SEQ ID NO: 1339 - RNA, 23 nt, Artificial
  synthetic
auaagaauuuacugaacuucugu

SEQ ID NO: 1340 - RNA, 23 nt, Artificial
  synthetic
aauaauaauccgucaguuuggcg

SEQ ID NO: 1341 - RNA, 23 nt, Artificial
  synthetic
uaucuacaaaguaaaaguuuucc

SEQ ID NO: 1342 - DNA, 23 bp, Artificial
  synthetic
aaguaaaaguuuucccuuaacuu

SEQ ID NO: 1343 - DNA, 23 bp, Artificial
  synthetic
aaaguaaaaguuuucccuuaacu

SEQ ID NO: 1344 - RNA, 23 nt, Artificial
  synthetic
caaaguaaaaguuuucccuuaac

SEQ ID NO: 1345 - RNA, 23 nt, Artificial
  synthetic
uacaaaguaaaaguuuucccuua

SEQ ID NO: 1346 - RNA, 23 nt, Artificial
  synthetic
auacaaaguaaaaguuuucccuu

SEQ ID NO: 1347 - RNA, 23 nt, Artificial
  synthetic
aucuacaaaguaaaaguuuuccc

SEQ ID NO: 1348 - DNA, 23 bp, Artificial
  synthetic
aacucutuaccggaagucggagg

SEQ ID NO: 1349 - DNA, 23 bp, Artificial
  synthetic
agacuctuuaccggaagucggag

SEQ ID NO: 1350 - RNA, 23 nt, Artificial
  synthetic
aggacucuuuaccggaagucgga

SEQ ID NO: 1351 - RNA, 23 nt, Artificial
  synthetic
uuuucacuuguacuucacauuug

SEQ ID NO: 1352 - RNA, 23 nt, Artificial
  synthetic
uuuuucacuuguacuucacauuu

SEQ ID NO: 1353 - DNA, 23 bp, Artificial
  synthetic
agauuctguacuuuucucaugug

SEQ ID NO: 1354 - RNA, 23 nt, Artificial
  synthetic
aaaucugaagugugagaagugga

SEQ ID NO: 1355 - DNA, 23 bp, Artificial
  synthetic
gaaauctgaagugugagaagugg

SEQ ID NO: 1356 - RNA, 23 nt, Artificial
  synthetic
ugaaaucugaagugugagaagug

SEQ ID NO: 1357 - DNA, 23 bp, Artificial
  synthetic
uugaaatcugaagugugagaagu

SEQ ID NO: 1358 - RNA, 21 nt, Artificial
  synthetic
ucagucuacgauuucuuuuga

SEQ ID NO: 1359 - RNA, 21 nt, Artificial
  synthetic
cucagucuacgauuucuuuua

SEQ ID NO: 1360 - RNA, 21 nt, Artificial
  synthetic
cagucuacgauuucuuuugaa

SEQ ID NO: 1361 - RNA, 21 nt, Artificial
  synthetic
aaauguucagacuuuguugua

SEQ ID NO: 1362 - RNA, 21 nt, Artificial
  synthetic
ugcuaucagugcuaaagugaa

SEQ ID NO: 1363 - RNA, 21 nt, Artificial
  synthetic
gauaacucagaagaauuuuua

SEQ ID NO: 1364 - RNA, 21 nt, Artificial
  synthetic
cguaugauagcaguuuaucua

SEQ ID NO: 1365 - RNA, 21 nt, Artificial
  synthetic
guaugauagcaguuuaucuua

SEQ ID NO: 1366 - RNA, 21 nt, Artificial
  synthetic
auccacuucucacacuucaga

SEQ ID NO: 1367 - RNA, 21 nt, Artificial
  synthetic
ucucacacuucagauuucaaa

SEQ ID NO: 1368 - RNA, 21 nt, Artificial
  synthetic
cucuacuaugccuaaacgcaa

SEQ ID NO: 1369 - RNA, 21 nt, Artificial
  synthetic
ucuacuaugccuaaacgcaua

SEQ ID NO: 1370 - RNA, 21 nt, Artificial
  synthetic
ucgaaaucacagaguuucuga

SEQ ID NO: 1371 - RNA, 21 nt, Artificial
  synthetic
cgaaaucacagaguuucugca

SEQ ID NO: 1372 - RNA, 21 nt, Artificial
  synthetic
uucuacuucugaaucuaugga

SEQ ID NO: 1373 - RNA, 21 nt, Artificial
  synthetic
acuacuaaacaaaaauagaga

SEQ ID NO: 1374 - RNA, 21 nt, Artificial
  synthetic
guucuacuucugaaucuauga

SEQ ID NO: 1375 - RNA, 21 nt, Artificial
  synthetic
ucuacuucugaaucuauggaa

SEQ ID NO: 1376 - RNA, 21 nt, Artificial
  synthetic
cuacuucugaaucuauggaua

SEQ ID NO: 1377 - RNA, 21 nt, Artificial
  synthetic
accaagugcuaaggauucuua

SEQ ID NO: 1378 - RNA, 21 nt, Artificial
  synthetic
uuaggaaaucaacauugaaua

SEQ ID NO: 1379 - RNA, 21 nt, Artificial
  synthetic
agccaacuccaguuuauacua

SEQ ID NO: 1380 - RNA, 21 nt, Artificial
  synthetic
uucuucagcaacucaguacga

SEQ ID NO: 1381 - RNA, 21 nt, Artificial
  synthetic
uuucuacuuugccauuuccaa

SEQ ID NO: 1382 - RNA, 21 nt, Artificial
  synthetic
uucuacuuugccauuuccaca

SEQ ID NO: 1383 - RNA, 21 nt, Artificial
  synthetic
ucuuguaacauccaauaggaa

SEQ ID NO: 1384 - RNA, 21 nt, Artificial
  synthetic
ccgaaacuggaaguuauuuaa

SEQ ID NO: 1385 - RNA, 21 nt, Artificial
  synthetic
aaacuggaaguuauuuauuua

SEQ ID NO: 1386 - RNA, 21 nt, Artificial
  synthetic
agugguucaacuuuuaaguua

SEQ ID NO: 1387 - RNA, 21 nt, Artificial
  synthetic
gugguucaacuuuuaaguuaa

SEQ ID NO: 1388 - RNA, 21 nt, Artificial
  synthetic
uaagggaaaaacuuuuacuua

SEQ ID NO: 1389 - RNA, 21 nt, Artificial
  synthetic
caugagaaaaguacagaauca

SEQ ID NO: 1390 - RNA, 21 nt, Artificial
  synthetic
ugaaucuauggaucaacuaca

SEQ ID NO: 1391 - RNA, 21 nt, Artificial
  synthetic
ccgaaacuggaaguuauuuaa

SEQ ID NO: 1392 - RNA, 21 nt, Artificial
  synthetic
cuugaaagucaugaacacaua

SEQ ID NO: 1393 - RNA, 21 nt, Artificial
  synthetic
agucaugaacacaucagcuaa

SEQ ID NO: 1394 - RNA, 21 nt, Artificial
  synthetic
gucaugaacacaucagcuaga

SEQ ID NO: 1395 - RNA, 21 nt, Artificial
  synthetic
caugaacacaucagcuagcaa

SEQ ID NO: 1396 - RNA, 21 nt, Artificial
  synthetic
agagugauucuugcugcuaua

SEQ ID NO: 1397 - RNA, 21 nt, Artificial
  synthetic
gugauucuugcugcuauuaca

SEQ ID NO: 1398 - RNA, 21 nt, Artificial
  synthetic
cgcccuuuuacuaaacuugaa

SEQ ID NO: 1399 - RNA, 21 nt, Artificial
  synthetic
uaccgucaaacugacggauua

SEQ ID NO: 1400 - RNA, 21 nt, Artificial
  synthetic
acugucuacagugguucaaca

SEQ ID NO: 1401 - RNA, 21 nt, Artificial
  synthetic
caugagaaaaguacagaauca

SEQ ID NO: 1402 - RNA, 21 nt, Artificial
  synthetic
ugaaucuauggaucaacuaca

SEQ ID NO: 1403 - RNA, 21 nt, Artificial
  synthetic
ccgaaacuggaaguuauuuaa

SEQ ID NO: 1404 - RNA, 21 nt, Artificial
  synthetic
cuugaaagucaugaacacaua

SEQ ID NO: 1405 - RNA, 21 nt, Artificial
  synthetic
agucaugaacacaucagcuaa

SEQ ID NO: 1406 - RNA, 21 nt, Artificial
  synthetic
gucaugaacacaucagcuaga

SEQ ID NO: 1407 - RNA, 21 nt, Artificial
  synthetic
caugaacacaucagcuagcaa

SEQ ID NO: 1408 - RNA, 21 nt, Artificial
  synthetic
agagugauucuugcugcuaua

SEQ ID NO: 1409 - RNA, 21 nt, Artificial
  synthetic
gugauucuugcugcuauuaca

SEQ ID NO: 1410 - RNA, 21 nt, Artificial
  synthetic
cgcccuuuuacuaaacuugaa

SEQ ID NO: 1411 - RNA, 21 nt, Artificial
  synthetic
uaccgucaaacugacggauua

SEQ ID NO: 1412 - RNA, 21 nt, Artificial
  synthetic
acugucuacagugguucaaca

SEQ ID NO: 1413 - RNA, 21 nt, Artificial
  synthetic
gugaaguacaagugaaaaaca

SEQ ID NO: 1414 - RNA, 21 nt, Artificial
  synthetic
agucaugaacacaucagcuaa

SEQ ID NO: 1415 - RNA, 23 nt, Artificial
  synthetic
ucaaaagaaaucguagacugagg

SEQ ID NO: 1416 - RNA, 23 nt, Artificial
  synthetic
uaaaagaaaucguagacugaggc

SEQ ID NO: 1417 - RNA, 23 nt, Artificial
  synthetic
uucaaaagaaaucguagacugag

SEQ ID NO: 1418 - RNA, 23 nt, Artificial
  synthetic
uacaacaaagucugaacauuuga

SEQ ID NO: 1419 - RNA, 23 nt, Artificial
  synthetic
uucacuuuagcacugauagcaga

SEQ ID NO: 1420 - RNA, 23 nt, Artificial
  synthetic
uaaaaauucuucugaguuaucuc

SEQ ID NO: 1421 - RNA, 23 nt, Artificial
  synthetic
uagauaaacugcuaucauacgua

SEQ ID NO: 1422 - RNA, 23 nt, Artificial
  synthetic
uaagauaaacugcuaucauacgu

SEQ ID NO: 1423 - RNA, 23 nt, Artificial
  synthetic
ucugaagugugagaaguggaucu

SEQ ID NO: 1424 - RNA, 23 nt, Artificial
  synthetic
uuugaaaucugaagugugagaag

SEQ ID NO: 1425 - RNA, 23 nt, Artificial
  synthetic
uugcguuuaggcauaguagagac

SEQ ID NO: 1426 - RNA, 23 nt, Artificial
  synthetic
uaugcguuuaggcauaguagaga

SEQ ID NO: 1427 - RNA, 23 nt, Artificial
  synthetic
ucagaaacucugugauuucgagg

SEQ ID NO: 1428 - RNA, 23 nt, Artificial
  synthetic
ugcagaaacucugugauuucgag

SEQ ID NO: 1429 - RNA, 23 nt, Artificial
  synthetic
uccauagauucagaaguagaacu

SEQ ID NO: 1430 - RNA, 23 nt, Artificial
  synthetic
ucucuauuuuuguuuaguaguug

SEQ ID NO: 1431 - RNA, 23 nt, Artificial
  synthetic
ucauagauucagaaguagaacuu

SEQ ID NO: 1432 - RNA, 23 nt, Artificial
  synthetic
uuccauagauucagaaguagaac

SEQ ID NO: 1433 - RNA, 23 nt, Artificial
  synthetic
uauccauagauucagaaguagaa

SEQ ID NO: 1434 - RNA, 23 nt, Artificial
  synthetic
uaagaauccuuagcacuugguuc

SEQ ID NO: 1435 - RNA, 23 nt, Artificial
  synthetic
uauucaauguugauuuccuaacu

SEQ ID NO: 1436 - RNA, 23 nt, Artificial
  synthetic
uaguauaaacuggaguuggcugu

SEQ ID NO: 1437 - RNA, 23 nt, Artificial
  synthetic
ucguacugaguugcugaagaaga

SEQ ID NO: 1438 - RNA, 23 nt, Artificial
  synthetic
uuggaaauggcaaaguagaaaga

SEQ ID NO: 1439 - RNA, 23 nt, Artificial
  synthetic
uguggaaauggcaaaguagaaag

SEQ ID NO: 1440 - RNA, 23 nt, Artificial
  synthetic
uuccuauuggauguuacaagaaa

SEQ ID NO: 1441 - RNA, 23 nt, Artificial
  synthetic
uuaaauaacuuccaguuucggca

SEQ ID NO: 1442 - RNA, 23 nt, Artificial
  synthetic
uaaauaaauaacuuccaguuucg

SEQ ID NO: 1443 - RNA, 23 nt, Artificial
  synthetic
uaacuuaaaaguugaaccacugu

SEQ ID NO: 1444 - RNA, 23 nt, Artificial
  synthetic
uuaacuuaaaaguugaaccacug

SEQ ID NO: 1445 - RNA, 23 nt, Artificial
  synthetic
uaaguaaaaguuuuucccuuaac

SEQ ID NO: 1446 - RNA, 23 nt, Artificial
  synthetic
ugauucuguacuuuucucaugug

SEQ ID NO: 1447 - RNA, 23 nt, Artificial
  synthetic
uguaguugauccauagauucaga

SEQ ID NO: 1448 - RNA, 23 nt, Artificial
  synthetic
uuaaauaacuuccaguuucggca

SEQ ID NO: 1449 - RNA, 23 nt, Artificial
  synthetic
uauguguucaugacuuucaaggg

SEQ ID NO: 1450 - RNA, 23 nt, Artificial
  synthetic
uuagcugauguguucaugacuuu

SEQ ID NO: 1451 - RNA, 23 nt, Artificial
  synthetic
ucuagcugauguguucaugacuu

SEQ ID NO: 1452 - RNA, 23 nt, Artificial
  synthetic
uugcuagcugauguguucaugac

SEQ ID NO: 1453 - RNA, 23 nt, Artificial
  synthetic
uauagcagcaagaaucacucuug

SEQ ID NO: 1454 - RNA, 23 nt, Artificial
  synthetic
uguaauagcagcaagaaucacuc

SEQ ID NO: 1455 - RNA, 23 nt, Artificial
  synthetic
uucaaguuuaguaaaagggcguu

SEQ ID NO: 1456 - RNA, 23 nt, Artificial
  synthetic
uaauccgucaguuugacgguaag

SEQ ID NO: 1457 - RNA, 23 nt, Artificial
  synthetic
uguugaaccacuguagacaguga

SEQ ID NO: 1458 - DNA, 23 bp, Artificial
  synthetic
ugauuctguacuuuucucaugug

SEQ ID NO: 1459 - DNA, 23 bp, Artificial
  synthetic
uguagutgauccauagauucaga

SEQ ID NO: 1460 - RNA, 23 nt, Artificial
  synthetic
uuaaauaacuuccaguuucggca

SEQ ID NO: 1461 - DNA, 23 bp, Artificial
  synthetic
uaugugtucaugacuuucaaggg

SEQ ID NO: 1462 - RNA, 23 nt, Artificial
  synthetic
uuagcugauguguucaugacuuu

SEQ ID NO: 1463 - DNA, 23 bp, Artificial
  synthetic
ucuagctgauguguucaugacuu

SEQ ID NO: 1464 - RNA, 23 nt, Artificial
  synthetic
uugcuagcugauguguucaugac

SEQ ID NO: 1465 - RNA, 23 nt, Artificial
  synthetic
uauagcagcaagaaucacucuug

SEQ ID NO: 1466 - RNA, 23 nt, Artificial
  synthetic
uguaauagcagcaagaaucacuc

SEQ ID NO: 1467 - DNA, 23 bp, Artificial
  synthetic
uucaagtuuaguaaaagggcguu

SEQ ID NO: 1468 - RNA, 23 nt, Artificial
  synthetic
uaauccgucaguuugacgguaag

SEQ ID NO: 1469 - RNA, 23 nt, Artificial
  synthetic
uguugaaccacuguagacaguga

SEQ ID NO: 1470 - DNA, 23 bp, Artificial
  synthetic
uguuuutcacuuguacuucacau

SEQ ID NO: 1471 - RNA, 23 nt, Artificial
  synthetic
uuagcugauguguucaugacucu

SEQ ID NO: 1472 - RNA, 23 nt, Artificial
  synthetic
ccucagucuacgauuucuuuuga

SEQ ID NO: 1473 - RNA, 23 nt, Artificial
  synthetic
gccucagucuacgauuucuuuug

SEQ ID NO: 1474 - RNA, 23 nt, Artificial
  synthetic
cucagucuacgauuucuuuugau

SEQ ID NO: 1475 - RNA, 23 nt, Artificial
  synthetic
ucaaauguucagacuuuguugug

SEQ ID NO: 1476 - RNA, 23 nt, Artificial
  synthetic
ucugcuaucagugcuaaagugaa

SEQ ID NO: 1477 - RNA, 23 nt, Artificial
  synthetic
gagauaacucagaagaauuuuua

SEQ ID NO: 1478 - RNA, 23 nt, Artificial
  synthetic
uacguaugauagcaguuuaucuu

SEQ ID NO: 1479 - RNA, 23 nt, Artificial
  synthetic
acguaugauagcaguuuaucuuc

SEQ ID NO: 1480 - RNA, 23 nt, Artificial
  synthetic
agauccacuucucacacuucaga

SEQ ID NO: 1481 - RNA, 23 nt, Artificial
  synthetic
cuucucacacuucagauuucaac

SEQ ID NO: 1482 - RNA, 23 nt, Artificial
  synthetic
gucucuacuaugccuaaacgcau

SEQ ID NO: 1483 - RNA, 23 nt, Artificial
  synthetic
ucucuacuaugccuaaacgcaug

SEQ ID NO: 1484 - RNA, 23 nt, Artificial
  synthetic
ccucgaaaucacagaguuucugc

SEQ ID NO: 1485 - RNA, 23 nt, Artificial
  synthetic
cucgaaaucacagaguuucugcu

SEQ ID NO: 1486 - RNA, 23 nt, Artificial
  synthetic
aguucuacuucugaaucuaugga

SEQ ID NO: 1487 - RNA, 23 nt, Artificial
  synthetic
caacuacuaaacaaaaauagaga

SEQ ID NO: 1488 - RNA, 23 nt, Artificial
  synthetic
aaguucuacuucugaaucuaugg

SEQ ID NO: 1489 - RNA, 23 nt, Artificial
  synthetic
guucuacuucugaaucuauggau

SEQ ID NO: 1490 - RNA, 23 nt, Artificial
  synthetic
uucuacuucugaaucuauggauc

SEQ ID NO: 1491 - RNA, 23 nt, Artificial
  synthetic
gaaccaagugcuaaggauucuuu

SEQ ID NO: 1492 - RNA, 23 nt, Artificial
  synthetic
aguuaggaaaucaacauugaauc

SEQ ID NO: 1493 - RNA, 23 nt, Artificial
  synthetic
acagccaacuccaguuuauacuc

SEQ ID NO: 1494 - RNA, 23 nt, Artificial
  synthetic
ucuucuucagcaacucaguacgg

SEQ ID NO: 1495 - RNA, 23 nt, Artificial
  synthetic
ucuuucuacuuugccauuuccac

SEQ ID NO: 1496 - RNA, 23 nt, Artificial
  synthetic
cuuucuacuuugccauuuccacg

SEQ ID NO: 1497 - RNA, 23 nt, Artificial
  synthetic
uuucuuguaacauccaauaggaa

SEQ ID NO: 1498 - RNA, 23 nt, Artificial
  synthetic
ugccgaaacuggaaguuauuuau

SEQ ID NO: 1499 - RNA, 23 nt, Artificial
  synthetic
cgaaacuggaaguuauuuauuuu

SEQ ID NO: 1500 - RNA, 23 nt, Artificial
  synthetic
acagugguucaacuuuuaaguua

SEQ ID NO: 1501 - RNA, 23 nt, Artificial
  synthetic
cagugguucaacuuuuaaguuaa

SEQ ID NO: 1502 - RNA, 23 nt, Artificial
  synthetic
guuaagggaaaaacuuuuacuuu

SEQ ID NO: 1503 - RNA, 23 nt, Artificial
  synthetic
cacaugagaaaaguacagaaucc

SEQ ID NO: 1504 - RNA, 23 nt, Artificial
  synthetic
ucugaaucuauggaucaacuacu

SEQ ID NO: 1505 - RNA, 23 nt, Artificial
  synthetic
ugccgaaacuggaaguuauuuau

SEQ ID NO: 1506 - RNA, 23 nt, Artificial
  synthetic
cccuugaaagucaugaacacauc

SEQ ID NO: 1507 - RNA, 23 nt, Artificial
  synthetic
aaagucaugaacacaucagcuag

SEQ ID NO: 1508 - RNA, 23 nt, Artificial
  synthetic
aagucaugaacacaucagcuagc

SEQ ID NO: 1509 - RNA, 23 nt, Artificial
  synthetic
gucaugaacacaucagcuagcaa

SEQ ID NO: 1510 - RNA, 23 nt, Artificial
  synthetic
caagagugauucuugcugcuauu

SEQ ID NO: 1511 - RNA, 23 nt, Artificial
  synthetic
gagugauucuugcugcuauuacu

SEQ ID NO: 1512 - RNA, 23 nt, Artificial
  synthetic
aacgcccuuuuacuaaacuugac

SEQ ID NO: 1513 - RNA, 23 nt, Artificial
  synthetic
cuuaccgucaaacugacggauua

SEQ ID NO: 1514 - RNA, 23 nt, Artificial
  synthetic
ucacugucuacagugguucaacu

SEQ ID NO: 1515 - RNA, 23 nt, Artificial
  synthetic
cacaugagaaaaguacagaaucc

SEQ ID NO: 1516 - RNA, 23 nt, Artificial
  synthetic
ucugaaucuauggaucaacuacu

SEQ ID NO: 1517 - RNA, 23 nt, Artificial
  synthetic
ugccgaaacuggaaguuauuuau

SEQ ID NO: 1518 - RNA, 23 nt, Artificial
  synthetic
cccuugaaagucaugaacacauc

SEQ ID NO: 1519 - RNA, 23 nt, Artificial
  synthetic
aaagucaugaacacaucagcuag

SEQ ID NO: 1520 - RNA, 23 nt, Artificial
  synthetic
aagucaugaacacaucagcuagc

SEQ ID NO: 1521 - RNA, 23 nt, Artificial
  synthetic
gucaugaacacaucagcuagcaa

SEQ ID NO: 1522 - RNA, 23 nt, Artificial
  synthetic
caagagugauucuugcugcuauu

SEQ ID NO: 1523 - RNA, 23 nt, Artificial
  synthetic
gagugauucuugcugcuauuacu

SEQ ID NO: 1524 - RNA, 23 nt, Artificial
  synthetic
aacgcccuuuuacuaaacuugac

SEQ ID NO: 1525 - RNA, 23 nt, Artificial
  synthetic
cuuaccgucaaacugacggauua

SEQ ID NO: 1526 - RNA, 23 nt, Artificial
  synthetic
ucacugucuacagugguucaacu

SEQ ID NO: 1527 - RNA, 23 nt, Artificial
  synthetic
augugaaguacaagugaaaaaug

SEQ ID NO: 1528 - RNA, 23 nt, Artificial
  synthetic
aaagucaugaacacaucagcuag

SEQ ID NO: 1529 - RNA, 21 nt, Artificial
  synthetic
ucagucuacgauuucuuuuga

SEQ ID NO: 1530 - RNA, 21 nt, Artificial
  synthetic
cucagucuacgauuucuuuua

SEQ ID NO: 1531 - RNA, 21 nt, Artificial
  synthetic
cagucuacgauuucuuuugaa

SEQ ID NO: 1532 - RNA, 21 nt, Artificial
  synthetic
aaauguucagacuuuguugua

SEQ ID NO: 1533 - RNA, 21 nt, Artificial
  synthetic
ugcuaucagugcuaaagugaa

SEQ ID NO: 1534 - RNA, 21 nt, Artificial
  synthetic
gauaacucagaagaauuuuua

SEQ ID NO: 1535 - RNA, 21 nt, Artificial
  synthetic
cguaugauagcaguuuaucua

SEQ ID NO: 1536 - RNA, 21 nt, Artificial
  synthetic
guaugauagcaguuuaucuua

SEQ ID NO: 1537 - RNA, 21 nt, Artificial
  synthetic
auccacuucucacacuucaga

SEQ ID NO: 1538 - RNA, 21 nt, Artificial
  synthetic
ucucacacuucagauuucaaa

SEQ ID NO: 1539 - RNA, 21 nt, Artificial
  synthetic
cucuacuaugccuaaacgcaa

SEQ ID NO: 1540 - RNA, 21 nt, Artificial
  synthetic
ucuacuaugccuaaacgcaua

SEQ ID NO: 1541 - RNA, 21 nt, Artificial
  synthetic
ucgaaaucacagaguuucuga

SEQ ID NO: 1542 - RNA, 21 nt, Artificial
  synthetic
cgaaaucacagaguuucugca

SEQ ID NO: 1543 - RNA, 21 nt, Artificial
  synthetic
uucuacuucugaaucuaugga

SEQ ID NO: 1544 - RNA, 21 nt, Artificial
  synthetic
acuacuaaacaaaaauagaga

SEQ ID NO: 1545 - RNA, 21 nt, Artificial
  synthetic
guucuacuucugaaucuauga

SEQ ID NO: 1546 - RNA, 21 nt, Artificial
  synthetic
ucuacuucugaaucuauggaa

SEQ ID NO: 1547 - RNA, 21 nt, Artificial
  synthetic
cuacuucugaaucuauggaua

SEQ ID NO: 1548 - RNA, 21 nt, Artificial
  synthetic
accaagugcuaaggauucuua

SEQ ID NO: 1549 - RNA, 21 nt, Artificial
  synthetic
uuaggaaaucaacauugaaua

SEQ ID NO: 1550 - RNA, 21 nt, Artificial
  synthetic
agccaacuccaguuuauacua

SEQ ID NO: 1551 - RNA, 21 nt, Artificial
  synthetic
uucuucagcaacucaguacga

SEQ ID NO: 1552 - RNA, 21 nt, Artificial
  synthetic
uuucuacuuugccauuuccaa

SEQ ID NO: 1553 - RNA, 21 nt, Artificial
  synthetic
uucuacuuugccauuuccaca

SEQ ID NO: 1554 - RNA, 21 nt, Artificial
  synthetic
ucuuguaacauccaauaggaa

SEQ ID NO: 1555 - RNA, 21 nt, Artificial
  synthetic
ccgaaacuggaaguuauuuaa

SEQ ID NO: 1556 - RNA, 21 nt, Artificial
  synthetic
aaacuggaaguuauuuauuua

SEQ ID NO: 1557 - RNA, 21 nt, Artificial
  synthetic
agugguucaacuuuuaaguua

SEQ ID NO: 1558 - RNA, 21 nt, Artificial
  synthetic
gugguucaacuuuuaaguuaa

SEQ ID NO: 1559 - RNA, 21 nt, Artificial
  synthetic
uaagggaaaaacuuuuacuua

SEQ ID NO: 1560 - RNA, 21 nt, Artificial
  synthetic
caugagaaaaguacagaauca

SEQ ID NO: 1561 - RNA, 21 nt, Artificial
  synthetic
ugaaucuauggaucaacuaca

SEQ ID NO: 1562 - RNA, 21 nt, Artificial
  synthetic
ccgaaacuggaaguuauuuaa

SEQ ID NO: 1563 - RNA, 21 nt, Artificial
  synthetic
cuugaaagucaugaacacaua

SEQ ID NO: 1564 - RNA, 21 nt, Artificial
  synthetic
agucaugaacacaucagcuaa

SEQ ID NO: 1565 - RNA, 21 nt, Artificial
  synthetic
gucaugaacacaucagcuaga

SEQ ID NO: 1566 - RNA, 21 nt, Artificial
  synthetic
caugaacacaucagcuagcaa

SEQ ID NO: 1567 - RNA, 21 nt, Artificial
  synthetic
agagugauucuugcugcuaua

SEQ ID NO: 1568 - RNA, 21 nt, Artificial
  synthetic
gugauucuugcugcuauuaca

SEQ ID NO: 1569 - RNA, 21 nt, Artificial
  synthetic
cgcccuuuuacuaaacuugaa

SEQ ID NO: 1570 - RNA, 21 nt, Artificial
  synthetic
uaccgucaaacugacggauua

SEQ ID NO: 1571 - RNA, 21 nt, Artificial
  synthetic
acugucuacagugguucaaca

SEQ ID NO: 1572 - RNA, 21 nt, Artificial
  synthetic
caugagaaaaguacagaauca

SEQ ID NO: 1573 - RNA, 21 nt, Artificial
  synthetic
ugaaucuauggaucaacuaca

SEQ ID NO: 1574 - RNA, 21 nt, Artificial
  synthetic
ccgaaacuggaaguuauuuaa

SEQ ID NO: 1575 - RNA, 21 nt, Artificial
  synthetic
cuugaaagucaugaacacaua

SEQ ID NO: 1576 - RNA, 21 nt, Artificial
  synthetic
agucaugaacacaucagcuaa

SEQ ID NO: 1577 - RNA, 21 nt, Artificial
  synthetic
gucaugaacacaucagcuaga

SEQ ID NO: 1578 - RNA, 21 nt, Artificial
  synthetic
caugaacacaucagcuagcaa

SEQ ID NO: 1579 - RNA, 21 nt, Artificial
  synthetic
agagugauucuugcugcuaua

SEQ ID NO: 1580 - RNA, 21 nt, Artificial
  synthetic
gugauucuugcugcuauuaca

SEQ ID NO: 1581 - RNA, 21 nt, Artificial
  synthetic
cgcccuuuuacuaaacuugaa

SEQ ID NO: 1582 - RNA, 21 nt, Artificial
  synthetic
uaccgucaaacugacggauua

SEQ ID NO: 1583 - RNA, 21 nt, Artificial
  synthetic
acugucuacagugguucaaca

SEQ ID NO: 1584 - RNA, 21 nt, Artificial
  synthetic
gugaaguacaagugaaaaaca

SEQ ID NO: 1585 - RNA, 21 nt, Artificial
  synthetic
agucaugaacacaucagcuaa

SEQ ID NO: 1586 - RNA, 23 nt, Artificial
  synthetic
ucaaaagaaaucguagacugagg

SEQ ID NO: 1587 - RNA, 23 nt, Artificial
  synthetic
uaaaagaaaucguagacugaggc

SEQ ID NO: 1588 - RNA, 23 nt, Artificial
  synthetic
uucaaaagaaaucguagacugag

SEQ ID NO: 1589 - RNA, 23 nt, Artificial
  synthetic
uacaacaaagucugaacauuuga

SEQ ID NO: 1590 - RNA, 23 nt, Artificial
  synthetic
uucacuuuagcacugauagcaga

SEQ ID NO: 1591 - RNA, 23 nt, Artificial
  synthetic
uaaaaauucuucugaguuaucuc

SEQ ID NO: 1592 - RNA, 23 nt, Artificial
  synthetic
uagauaaacugcuaucauacgua

SEQ ID NO: 1593 - RNA, 23 nt, Artificial
  synthetic
uaagauaaacugcuaucauacgu

SEQ ID NO: 1594 - RNA, 23 nt, Artificial
  synthetic
ucugaagugugagaaguggaucu

SEQ ID NO: 1595 - RNA, 23 nt, Artificial
  synthetic
uuugaaaucugaagugugagaag

SEQ ID NO: 1596 - RNA, 23 nt, Artificial
  synthetic
uugcguuuaggcauaguagagac

SEQ ID NO: 1597 - RNA, 23 nt, Artificial
  synthetic
uaugcguuuaggcauaguagaga

SEQ ID NO: 1598 - RNA, 23 nt, Artificial
  synthetic
ucagaaacucugugauuucgagg

SEQ ID NO: 1599 - RNA, 23 nt, Artificial
  synthetic
ugcagaaacucugugauuucgag

SEQ ID NO: 1600 - RNA, 23 nt, Artificial
  synthetic
uccauagauucagaaguagaacu

SEQ ID NO: 1601 - RNA, 23 nt, Artificial
  synthetic
ucucuauuuuuguuuaguaguug

SEQ ID NO: 1602 - RNA, 23 nt, Artificial
  synthetic
ucauagauucagaaguagaacuu

SEQ ID NO: 1603 - RNA, 23 nt, Artificial
  synthetic
uuccauagauucagaaguagaac

SEQ ID NO: 1604 - RNA, 23 nt, Artificial
  synthetic
uauccauagauucagaaguagaa

SEQ ID NO: 1605 - RNA, 23 nt, Artificial
  synthetic
uaagaauccuuagcacuugguuc

SEQ ID NO: 1606 - RNA, 23 nt, Artificial
  synthetic
uauucaauguugauuuccuaacu

SEQ ID NO: 1607 - RNA, 23 nt, Artificial
  synthetic
uaguauaaacuggaguuggcugu

SEQ ID NO: 1608 - RNA, 23 nt, Artificial
  synthetic
ucguacugaguugcugaagaaga

SEQ ID NO: 1609 - RNA, 23 nt, Artificial
  synthetic
uuggaaauggcaaaguagaaaga

SEQ ID NO: 1610 - RNA, 23 nt, Artificial
  synthetic
uguggaaauggcaaaguagaaag

SEQ ID NO: 1611 - RNA, 23 nt, Artificial
  synthetic
uuccuauuggauguuacaagaaa

SEQ ID NO: 1612 - RNA, 23 nt, Artificial
  synthetic
uuaaauaacuuccaguuucggca

SEQ ID NO: 1613 - RNA, 23 nt, Artificial
  synthetic
uaaauaaauaacuuccaguuucg

SEQ ID NO: 1614 - RNA, 23 nt, Artificial
  synthetic
uaacuuaaaaguugaaccacugu

SEQ ID NO: 1615 - RNA, 23 nt, Artificial
  synthetic
uuaacuuaaaaguugaaccacug

SEQ ID NO: 1616 - RNA, 23 nt, Artificial
  synthetic
uaaguaaaaguuuuucccuuaac

SEQ ID NO: 1617 - RNA, 23 nt, Artificial
  synthetic
ugauucuguacuuuucucaugug

SEQ ID NO: 1618 - RNA, 23 nt, Artificial
  synthetic
uguaguugauccauagauucaga

SEQ ID NO: 1619 - RNA, 23 nt, Artificial
  synthetic
uuaaauaacuuccaguuucggca

SEQ ID NO: 1620 - RNA, 23 nt, Artificial
  synthetic
uauguguucaugacuuucaaggg

SEQ ID NO: 1621 - RNA, 23 nt, Artificial
  synthetic
uuagcugauguguucaugacuuu

SEQ ID NO: 1622 - RNA, 23 nt, Artificial
  synthetic
ucuagcugauguguucaugacuu

SEQ ID NO: 1623 - RNA, 23 nt, Artificial
  synthetic
uugcuagcugauguguucaugac

SEQ ID NO: 1624 - RNA, 23 nt, Artificial
  synthetic
uauagcagcaagaaucacucuug

SEQ ID NO: 1625 - RNA, 23 nt, Artificial
  synthetic
uguaauagcagcaagaaucacuc

SEQ ID NO: 1626 - RNA, 23 nt, Artificial
  synthetic
uucaaguuuaguaaaagggcguu

SEQ ID NO: 1627 - RNA, 23 nt, Artificial
  synthetic
uaauccgucaguuugacgguaag

SEQ ID NO: 1628 - RNA, 23 nt, Artificial
  synthetic
uguugaaccacuguagacaguga

SEQ ID NO: 1629 - DNA, 23 bp, Artificial
  synthetic
ugauuctguacuuuucucaugug

SEQ ID NO: 1630 - DNA, 23 bp, Artificial
  synthetic
uguagutgauccauagauucaga

SEQ ID NO: 1631 - RNA, 23 nt, Artificial
  synthetic
uuaaauaacuuccaguuucggca

SEQ ID NO: 1632 - DNA, 23 bp, Artificial
  synthetic
uaugugtucaugacuuucaaggg

SEQ ID NO: 1633 - RNA, 23 nt, Artificial
  synthetic
uuagcugauguguucaugacuuu

SEQ ID NO: 1634 - DNA, 23 bp, Artificial
  synthetic
ucuagctgauguguucaugacuu

SEQ ID NO: 1635 - RNA, 23 nt, Artificial
  synthetic
uugcuagcugauguguucaugac

SEQ ID NO: 1636 - RNA, 23 nt, Artificial
  synthetic
uauagcagcaagaaucacucuug

SEQ ID NO: 1637 - RNA, 23 nt, Artificial
  synthetic
uguaauagcagcaagaaucacuc

SEQ ID NO: 1638 - DNA, 23 bp, Artificial
  synthetic
uucaagtuuaguaaaagggcguu

SEQ ID NO: 1639 - RNA, 23 nt, Artificial
  synthetic
uaauccgucaguuugacgguaag

SEQ ID NO: 1640 - RNA, 23 nt, Artificial
  synthetic
uguugaaccacuguagacaguga

SEQ ID NO: 1641 - DNA, 23 bp, Artificial
  synthetic
uguuuutcacuuguacuucacau

SEQ ID NO: 1642 - RNA, 23 nt, Artificial
  synthetic
uuagcugauguguucaugacucu

SEQ ID NO: 1643 - RNA, 21 nt, Artificial
  synthetic
uccgacuuccgguaaagagua

SEQ ID NO: 1644 - RNA, 21 nt, Artificial
  synthetic
ccgacuuccgguaaagaguca

SEQ ID NO: 1645 - RNA, 21 nt, Artificial
  synthetic
cgacuuccgguaaagagucca

SEQ ID NO: 1646 - RNA, 21 nt, Artificial
  synthetic
aaugugaaguacaagugaaaa

SEQ ID NO: 1647 - RNA, 21 nt, Artificial
  synthetic
augugaaguacaagugaaaaa

SEQ ID NO: 1648 - RNA, 21 nt, Artificial
  synthetic
gugaaguacaagugaaaaaua

SEQ ID NO: 1649 - RNA, 21 nt, Artificial
  synthetic
caugagaaaaguacagaauca

SEQ ID NO: 1650 - RNA, 21 nt, Artificial
  synthetic
cacuucucacacuucagauua

SEQ ID NO: 1651 - RNA, 21 nt, Artificial
  synthetic
acuucucacacuucagauuua

SEQ ID NO: 1652 - RNA, 21 nt, Artificial
  synthetic
cuucucacacuucagauuuca

SEQ ID NO: 1653 - RNA, 21 nt, Artificial
  synthetic
uucucacacuucagauuucaa

SEQ ID NO: 1654 - RNA, 21 nt, Artificial
  synthetic
ucucacacuucagauuucaaa

SEQ ID NO: 1655 - RNA, 21 nt, Artificial
  synthetic
cucacacuucagauuucaaca

SEQ ID NO: 1656 - RNA, 21 nt, Artificial
  synthetic
ucacacuucagauuucaacca

SEQ ID NO: 1657 - RNA, 21 nt, Artificial
  synthetic
cacacuucagauuucaaccca

SEQ ID NO: 1658 - RNA, 21 nt, Artificial
  synthetic
acuucagauuucaacccgaaa

SEQ ID NO: 1659 - RNA, 21 nt, Artificial
  synthetic
ucagaccaaagaguaguuaaa

SEQ ID NO: 1660 - RNA, 21 nt, Artificial
  synthetic
cagaccaaagaguaguuaaua

SEQ ID NO: 1661 - RNA, 21 nt, Artificial
  synthetic
cucuacuaugccuaaacgcaa

SEQ ID NO: 1662 - RNA, 21 nt, Artificial
  synthetic
ucuacuaugccuaaacgcaua

SEQ ID NO: 1663 - RNA, 21 nt, Artificial
  synthetic
uacuaugccuaaacgcaugua

SEQ ID NO: 1664 - RNA, 21 nt, Artificial
  synthetic
cuucugaaucuauggaucaaa

SEQ ID NO: 1665 - RNA, 21 nt, Artificial
  synthetic
uucugaaucuauggaucaaca

SEQ ID NO: 1666 - RNA, 21 nt, Artificial
  synthetic
ucugaaucuauggaucaacua

SEQ ID NO: 1667 - RNA, 21 nt, Artificial
  synthetic
cugaaucuauggaucaacuaa

SEQ ID NO: 1668 - RNA, 21 nt, Artificial
  synthetic
ugaaucuauggaucaacuaca

SEQ ID NO: 1669 - RNA, 21 nt, Artificial
  synthetic
gaaucuauggaucaacuacua

SEQ ID NO: 1670 - RNA, 21 nt, Artificial
  synthetic
aaucuauggaucaacuacuaa

SEQ ID NO: 1671 - RNA, 21 nt, Artificial
  synthetic
aucuauggaucaacuacuaaa

SEQ ID NO: 1672 - RNA, 21 nt, Artificial
  synthetic
uauacccaauaccuaugacga

SEQ ID NO: 1673 - RNA, 21 nt, Artificial
  synthetic
gacauauagagcaguaccaaa

SEQ ID NO: 1674 - RNA, 21 nt, Artificial
  synthetic
auauagagcaguaccaaauaa

SEQ ID NO: 1675 - RNA, 21 nt, Artificial
  synthetic
uauagagcaguaccaaauaua

SEQ ID NO: 1676 - RNA, 21 nt, Artificial
  synthetic
auagagcaguaccaaauauga

SEQ ID NO: 1677 - RNA, 21 nt, Artificial
  synthetic
agagcaguaccaaauaugcca

SEQ ID NO: 1678 - RNA, 21 nt, Artificial
  synthetic
ugucccaaauuaccauacaaa

SEQ ID NO: 1679 - RNA, 21 nt, Artificial
  synthetic
ucccaaauuaccauacaacaa

SEQ ID NO: 1680 - RNA, 21 nt, Artificial
  synthetic
aagcccuucuuucuacuuuga

SEQ ID NO: 1681 - RNA, 21 nt, Artificial
  synthetic
cccuucuuucuacuuugccaa

SEQ ID NO: 1682 - RNA, 21 nt, Artificial
  synthetic
ccuucuuucuacuuugccaua

SEQ ID NO: 1683 - RNA, 21 nt, Artificial
  synthetic
cuucuuucuacuuugccauua

SEQ ID NO: 1684 - RNA, 21 nt, Artificial
  synthetic
uucuuucuacuuugccauuua

SEQ ID NO: 1685 - RNA, 21 nt, Artificial
  synthetic
ucuuucuacuuugccauuuca

SEQ ID NO: 1686 - RNA, 21 nt, Artificial
  synthetic
cuuucuacuuugccauuucca

SEQ ID NO: 1687 - RNA, 21 nt, Artificial
  synthetic
uuucuacuuugccauuuccaa

SEQ ID NO: 1688 - RNA, 21 nt, Artificial
  synthetic
uucuacuuugccauuuccaca

SEQ ID NO: 1689 - RNA, 21 nt, Artificial
  synthetic
cauguacagucaggaauggua

SEQ ID NO: 1690 - RNA, 21 nt, Artificial
  synthetic
auguacagucaggaaugguua

SEQ ID NO: 1691 - RNA, 21 nt, Artificial
  synthetic
uguacagucaggaaugguuca

SEQ ID NO: 1692 - RNA, 21 nt, Artificial
  synthetic
caggaaugguuccuucucaua

SEQ ID NO: 1693 - RNA, 21 nt, Artificial
  synthetic
gaaugguuccuucucauccaa

SEQ ID NO: 1694 - RNA, 21 nt, Artificial
  synthetic
augguuccuucucauccaaca

SEQ ID NO: 1695 - RNA, 21 nt, Artificial
  synthetic
ugguuccuucucauccaacua

SEQ ID NO: 1696 - RNA, 21 nt, Artificial
  synthetic
guuccuucucauccaacugca

SEQ ID NO: 1697 - RNA, 21 nt, Artificial
  synthetic
caugcgccaaugaugcuaaua

SEQ ID NO: 1698 - RNA, 21 nt, Artificial
  synthetic
gcgccaaugaugcuaaugaca

SEQ ID NO: 1699 - RNA, 21 nt, Artificial
  synthetic
gccaaugaugcuaaugacgaa

SEQ ID NO: 1700 - RNA, 21 nt, Artificial
  synthetic
ccaaugaugcuaaugacgaca

SEQ ID NO: 1701 - RNA, 21 nt, Artificial
  synthetic
augaugcuaaugacgacacaa

SEQ ID NO: 1702 - RNA, 21 nt, Artificial
  synthetic
ugaugcuaaugacgacacaga

SEQ ID NO: 1703 - RNA, 21 nt, Artificial
  synthetic
cgcucaaagugcacuacagca

SEQ ID NO: 1704 - RNA, 21 nt, Artificial
  synthetic
agcccauuccagucucgacaa

SEQ ID NO: 1705 - RNA, 21 nt, Artificial
  synthetic
cccauuccagucucgacaaca

SEQ ID NO: 1706 - RNA, 21 nt, Artificial
  synthetic
caccaccaacagcaguuguaa

SEQ ID NO: 1707 - RNA, 21 nt, Artificial
  synthetic
accaccaacagcaguuguaaa

SEQ ID NO: 1708 - RNA, 21 nt, Artificial
  synthetic
ccaccaacagcaguuguaaga

SEQ ID NO: 1709 - RNA, 21 nt, Artificial
  synthetic
accaacagcaguuguaaggca

SEQ ID NO: 1710 - RNA, 21 nt, Artificial
  synthetic
caacagcaguuguaaggcuga

SEQ ID NO: 1711 - RNA, 21 nt, Artificial
  synthetic
cuucuacugcuucuaccaaca

SEQ ID NO: 1712 - RNA, 21 nt, Artificial
  synthetic
ucuacugcuucuaccaacuga

SEQ ID NO: 1713 - RNA, 21 nt, Artificial
  synthetic
cuacugcuucuaccaacugga

SEQ ID NO: 1714 - RNA, 21 nt, Artificial
  synthetic
cugcuucuaccaacuggaaga

SEQ ID NO: 1715 - RNA, 21 nt, Artificial
  synthetic
caacuggaagcacagaaaaca

SEQ ID NO: 1716 - RNA, 21 nt, Artificial
  synthetic
uugauuucuuguaacauccaa

SEQ ID NO: 1717 - RNA, 21 nt, Artificial
  synthetic
auuucuuguaacauccaauaa

SEQ ID NO: 1718 - RNA, 21 nt, Artificial
  synthetic
uucuuguaacauccaauagga

SEQ ID NO: 1719 - RNA, 21 nt, Artificial
  synthetic
ucuuguaacauccaauaggaa

SEQ ID NO: 1720 - RNA, 21 nt, Artificial
  synthetic
uguaacauccaauaggaauga

SEQ ID NO: 1721 - RNA, 21 nt, Artificial
  synthetic
uaacauccaauaggaaugcua

SEQ ID NO: 1722 - RNA, 21 nt, Artificial
  synthetic
aacauccaauaggaaugcuaa

SEQ ID NO: 1723 - RNA, 21 nt, Artificial
  synthetic
acauccaauaggaaugcuaaa

SEQ ID NO: 1724 - RNA, 21 nt, Artificial
  synthetic
cauccaauaggaaugcuaaca

SEQ ID NO: 1725 - RNA, 21 nt, Artificial
  synthetic
aauaggaaugcuaacaguuca

SEQ ID NO: 1726 - RNA, 21 nt, Artificial
  synthetic
auaggaaugcuaacaguucaa

SEQ ID NO: 1727 - RNA, 21 nt, Artificial
  synthetic
uaggaaugcuaacaguucaca

SEQ ID NO: 1728 - RNA, 21 nt, Artificial
  synthetic
aggaaugcuaacaguucacua

SEQ ID NO: 1729 - RNA, 21 nt, Artificial
  synthetic
ggaaugcuaacaguucacuua

SEQ ID NO: 1730 - RNA, 21 nt, Artificial
  synthetic
gaaugcuaacaguucacuuga

SEQ ID NO: 1731 - RNA, 21 nt, Artificial
  synthetic
gcuaacaguucacuugcagua

SEQ ID NO: 1732 - RNA, 21 nt, Artificial
  synthetic
caguucacuugcaguggaaga

SEQ ID NO: 1733 - RNA, 21 nt, Artificial
  synthetic
gaccgaguagaggcauuuaga

SEQ ID NO: 1734 - RNA, 21 nt, Artificial
  synthetic
accgaguagaggcauuuagga

SEQ ID NO: 1735 - RNA, 21 nt, Artificial
  synthetic
ggcuauuccauaauuccauaa

SEQ ID NO: 1736 - RNA, 21 nt, Artificial
  synthetic
ugccgaaacuggaaguuauua

SEQ ID NO: 1737 - RNA, 21 nt, Artificial
  synthetic
ccgaaacuggaaguuauuuaa

SEQ ID NO: 1738 - RNA, 21 nt, Artificial
  synthetic
cgaaacuggaaguuauuuaua

SEQ ID NO: 1739 - RNA, 21 nt, Artificial
  synthetic
gaaacuggaaguuauuuauua

SEQ ID NO: 1740 - RNA, 21 nt, Artificial
  synthetic
aaacuggaaguuauuuauuua

SEQ ID NO: 1741 - RNA, 21 nt, Artificial
  synthetic
uaauaacccuugaaagucaua

SEQ ID NO: 1742 - RNA, 21 nt, Artificial
  synthetic
aauaacccuugaaagucauga

SEQ ID NO: 1743 - RNA, 21 nt, Artificial
  synthetic
aacccuugaaagucaugaaca

SEQ ID NO: 1744 - RNA, 21 nt, Artificial
  synthetic
cuugaaagucaugaacacaua

SEQ ID NO: 1745 - RNA, 21 nt, Artificial
  synthetic
agucaugaacacaucagcuaa

SEQ ID NO: 1746 - RNA, 21 nt, Artificial
  synthetic
gucaugaacacaucagcuaga

SEQ ID NO: 1747 - RNA, 21 nt, Artificial
  synthetic
ucaugaacacaucagcuagca

SEQ ID NO: 1748 - RNA, 21 nt, Artificial
  synthetic
caugaacacaucagcuagcaa

SEQ ID NO: 1749 - RNA, 21 nt, Artificial
  synthetic
caugaacacaucagcuagcaa

SEQ ID NO: 1750 - RNA, 21 nt, Artificial
  synthetic
augaacacaucagcuagcaaa

SEQ ID NO: 1751 - RNA, 21 nt, Artificial
  synthetic
ugaacacaucagcuagcaaaa

SEQ ID NO: 1752 - RNA, 21 nt, Artificial
  synthetic
gaacacaucagcuagcaaaaa

SEQ ID NO: 1753 - RNA, 21 nt, Artificial
  synthetic
aacacaucagcuagcaaaaga

SEQ ID NO: 1754 - RNA, 21 nt, Artificial
  synthetic
caucagcuagcaaaagaagua

SEQ ID NO: 1755 - RNA, 21 nt, Artificial
  synthetic
cuagcaaaagaaguaacaaga

SEQ ID NO: 1756 - RNA, 21 nt, Artificial
  synthetic
guaacaagagugauucuugca

SEQ ID NO: 1757 - RNA, 21 nt, Artificial
  synthetic
uaacaagagugauucuugcua

SEQ ID NO: 1758 - RNA, 21 nt, Artificial
  synthetic
aacaagagugauucuugcuga

SEQ ID NO: 1759 - RNA, 21 nt, Artificial
  synthetic
agagugauucuugcugcuaua

SEQ ID NO: 1760 - RNA, 21 nt, Artificial
  synthetic
gagugauucuugcugcuauua

SEQ ID NO: 1761 - RNA, 21 nt, Artificial
  synthetic
gugauucuugcugcuauuaca

SEQ ID NO: 1762 - RNA, 21 nt, Artificial
  synthetic
uuggaacgcccuuuuacuaaa

SEQ ID NO: 1763 - RNA, 21 nt, Artificial
  synthetic
uggaacgcccuuuuacuaaaa

SEQ ID NO: 1764 - RNA, 21 nt, Artificial
  synthetic
gaacgcccuuuuacuaaacua

SEQ ID NO: 1765 - RNA, 21 nt, Artificial
  synthetic
aacgcccuuuuacuaaacuua

SEQ ID NO: 1766 - RNA, 21 nt, Artificial
  synthetic
acgcccuuuuacuaaacuuga

SEQ ID NO: 1767 - RNA, 21 nt, Artificial
  synthetic
cgcccuuuuacuaaacuugaa

SEQ ID NO: 1768 - RNA, 21 nt, Artificial
  synthetic
guuucaguaaauucuuaccga

SEQ ID NO: 1769 - RNA, 21 nt, Artificial
  synthetic
uuucaguaaauucuuaccgua

SEQ ID NO: 1770 - RNA, 21 nt, Artificial
  synthetic
uucaguaaauucuuaccguca

SEQ ID NO: 1771 - RNA, 21 nt, Artificial
  synthetic
ucaguaaauucuuaccgucaa

SEQ ID NO: 1772 - RNA, 21 nt, Artificial
  synthetic
caguaaauucuuaccgucaaa

SEQ ID NO: 1773 - RNA, 21 nt, Artificial
  synthetic
aguaaauucuuaccgucaaaa

SEQ ID NO: 1774 - RNA, 21 nt, Artificial
  synthetic
guaaauucuuaccgucaaaca

SEQ ID NO: 1775 - RNA, 21 nt, Artificial
  synthetic
uaaauucuuaccgucaaacua

SEQ ID NO: 1776 - RNA, 21 nt, Artificial
  synthetic
aaauucuuaccgucaaacuga

SEQ ID NO: 1777 - RNA, 21 nt, Artificial
  synthetic
aauucuuaccgucaaacugaa

SEQ ID NO: 1778 - RNA, 21 nt, Artificial
  synthetic
auucuuaccgucaaacugaca

SEQ ID NO: 1779 - RNA, 21 nt, Artificial
  synthetic
uucuuaccgucaaacugacga

SEQ ID NO: 1780 - RNA, 21 nt, Artificial
  synthetic
ucuuaccgucaaacugacgga

SEQ ID NO: 1781 - RNA, 21 nt, Artificial
  synthetic
cuuaccgucaaacugacggaa

SEQ ID NO: 1782 - RNA, 21 nt, Artificial
  synthetic
uuaccgucaaacugacggaua

SEQ ID NO: 1783 - RNA, 21 nt, Artificial
  synthetic
uaccgucaaacugacggauua

SEQ ID NO: 1784 - RNA, 21 nt, Artificial
  synthetic
uaccgucaaacugacggauua

SEQ ID NO: 1785 - RNA, 21 nt, Artificial
  synthetic
accgucaaacugacggauuaa

SEQ ID NO: 1786 - RNA, 21 nt, Artificial
  synthetic
aacugacggauuauuauuuaa

SEQ ID NO: 1787 - RNA, 21 nt, Artificial
  synthetic
aguuugaugaggugaucacua

SEQ ID NO: 1788 - RNA, 21 nt, Artificial
  synthetic
acugucuacagugguucaaca

SEQ ID NO: 1789 - RNA, 21 nt, Artificial
  synthetic
cugucuacagugguucaacua

SEQ ID NO: 1790 - RNA, 21 nt, Artificial
  synthetic
cuacagugguucaacuuuuaa

SEQ ID NO: 1791 - RNA, 21 nt, Artificial
  synthetic
uacagugguucaacuuuuaaa

SEQ ID NO: 1792 - RNA, 21 nt, Artificial
  synthetic
ucaacuuuuaaguuaagggaa

SEQ ID NO: 1793 - RNA, 21 nt, Artificial
  synthetic
aacuuuuaaguuaagggaaaa

SEQ ID NO: 1794 - RNA, 21 nt, Artificial
  synthetic
aaaaacuuuuacuuuguagaa

SEQ ID NO: 1795 - RNA, 21 nt, Artificial
  synthetic
cucagucuacgauuucuuuua

SEQ ID NO: 1796 - RNA, 21 nt, Artificial
  synthetic
ucagucuacgauuucuuuuga

SEQ ID NO: 1797 - RNA, 21 nt, Artificial
  synthetic
cagucuacgauuucuuuugaa

SEQ ID NO: 1798 - RNA, 21 nt, Artificial
  synthetic
caugagaaaaguacagaauca

SEQ ID NO: 1799 - RNA, 21 nt, Artificial
  synthetic
caugagaaaaguacagaauca

SEQ ID NO: 1800 - RNA, 21 nt, Artificial
  synthetic
aaauguucagacuuuguugua

SEQ ID NO: 1801 - RNA, 21 nt, Artificial
  synthetic
ugcuaucagugcuaaagugaa

SEQ ID NO: 1802 - RNA, 21 nt, Artificial
  synthetic
cguaugauagcaguuuaucua

SEQ ID NO: 1803 - RNA, 21 nt, Artificial
  synthetic
guaugauagcaguuuaucuua

SEQ ID NO: 1804 - RNA, 21 nt, Artificial
  synthetic
gauaacucagaagaauuuuua

SEQ ID NO: 1805 - RNA, 21 nt, Artificial
  synthetic
auccacuucucacacuucaga

SEQ ID NO: 1806 - RNA, 21 nt, Artificial
  synthetic
ucucacacuucagauuucaaa

SEQ ID NO: 1807 - RNA, 21 nt, Artificial
  synthetic
cucuacuaugccuaaacgcaa

SEQ ID NO: 1808 - RNA, 21 nt, Artificial
  synthetic
ucuacuaugccuaaacgcaua

SEQ ID NO: 1809 - RNA, 21 nt, Artificial
  synthetic
ucgaaaucacagaguuucuga

SEQ ID NO: 1810 - RNA, 21 nt, Artificial
  synthetic
cgaaaucacagaguuucugca

SEQ ID NO: 1811 - RNA, 21 nt, Artificial
  synthetic
guucuacuucugaaucuauga

SEQ ID NO: 1812 - RNA, 21 nt, Artificial
  synthetic
uucuacuucugaaucuaugga

SEQ ID NO: 1813 - RNA, 21 nt, Artificial
  synthetic
ucuacuucugaaucuauggaa

SEQ ID NO: 1814 - RNA, 21 nt, Artificial
  synthetic
cuacuucugaaucuauggaua

SEQ ID NO: 1815 - RNA, 21 nt, Artificial
  synthetic
ugaaucuauggaucaacuaca

SEQ ID NO: 1816 - RNA, 21 nt, Artificial
  synthetic
ugaaucuauggaucaacuaca

SEQ ID NO: 1817 - RNA, 21 nt, Artificial
  synthetic
acuacuaaacaaaaauagaga

SEQ ID NO: 1818 - RNA, 21 nt, Artificial
  synthetic
accaagugcuaaggauucuua

SEQ ID NO: 1819 - RNA, 21 nt, Artificial
  synthetic
uuaggaaaucaacauugaaua

SEQ ID NO: 1820 - RNA, 21 nt, Artificial
  synthetic
agccaacuccaguuuauacua

SEQ ID NO: 1821 - RNA, 21 nt, Artificial
  synthetic
uucuucagcaacucaguacga

SEQ ID NO: 1822 - RNA, 21 nt, Artificial
  synthetic
uuucuacuuugccauuuccaa

SEQ ID NO: 1823 - RNA, 21 nt, Artificial
  synthetic
uucuacuuugccauuuccaca

SEQ ID NO: 1824 - RNA, 21 nt, Artificial
  synthetic
ucuuguaacauccaauaggaa

SEQ ID NO: 1825 - RNA, 21 nt, Artificial
  synthetic
ccgaaacuggaaguuauuuaa

SEQ ID NO: 1826 - RNA, 21 nt, Artificial
  synthetic
ccgaaacuggaaguuauuuaa

SEQ ID NO: 1827 - RNA, 21 nt, Artificial
  synthetic
ccgaaacuggaaguuauuuaa

SEQ ID NO: 1828 - RNA, 21 nt, Artificial
  synthetic
aaacuggaaguuauuuauuua

SEQ ID NO: 1829 - RNA, 21 nt, Artificial
  synthetic
cuugaaagucaugaacacaua

SEQ ID NO: 1830 - RNA, 21 nt, Artificial
  synthetic
cuugaaagucaugaacacaua

SEQ ID NO: 1831 - RNA, 21 nt, Artificial
  synthetic
agucaugaacacaucagcuaa

SEQ ID NO: 1832 - RNA, 21 nt, Artificial
  synthetic
agucaugaacacaucagcuaa

SEQ ID NO: 1833 - RNA, 21 nt, Artificial
  synthetic
agucaugaacacaucagcuaa

SEQ ID NO: 1834 - RNA, 21 nt, Artificial
  synthetic
gucaugaacacaucagcuaga

SEQ ID NO: 1835 - RNA, 21 nt, Artificial
  synthetic
gucaugaacacaucagcuaga

SEQ ID NO: 1836 - RNA, 21 nt, Artificial
  synthetic
caugaacacaucagcuagcaa

SEQ ID NO: 1837 - RNA, 21 nt, Artificial
  synthetic
agagugauucuugcugcuaua

SEQ ID NO: 1838 - RNA, 21 nt, Artificial
  synthetic
agagugauucuugcugcuaua

SEQ ID NO: 1839 - RNA, 21 nt, Artificial
  synthetic
gugauucuugcugcuauuaca

SEQ ID NO: 1840 - RNA, 21 nt, Artificial
  synthetic
gugauucuugcugcuauuaca

SEQ ID NO: 1841 - RNA, 21 nt, Artificial
  synthetic
cgcccuuuuacuaaacuugaa

SEQ ID NO: 1842 - RNA, 21 nt, Artificial
  synthetic
cgcccuuuuacuaaacuugaa

SEQ ID NO: 1843 - RNA, 21 nt, Artificial
  synthetic
uaccgucaaacugacggauua

SEQ ID NO: 1844 - RNA, 21 nt, Artificial
  synthetic
acugucuacagugguucaaca

SEQ ID NO: 1845 - RNA, 21 nt, Artificial
  synthetic
acugucuacagugguucaaca

SEQ ID NO: 1846 - RNA, 21 nt, Artificial
  synthetic
agugguucaacuuuuaaguua

SEQ ID NO: 1847 - RNA, 21 nt, Artificial
  synthetic
gugguucaacuuuuaaguuaa

SEQ ID NO: 1848 - RNA, 21 nt, Artificial
  synthetic
uaagggaaaaacuuuuacuua

SEQ ID NO: 1849 - RNA, 21 nt, Artificial
  synthetic
ccucagccuacgauuucuuua

SEQ ID NO: 1850 - RNA, 21 nt, Artificial
  synthetic
cucagccuacgauuucuuuua

SEQ ID NO: 1851 - RNA, 21 nt, Artificial
  synthetic
ucagccuacgauuucuuuuga

SEQ ID NO: 1852 - RNA, 21 nt, Artificial
  synthetic
gaggaugguucauauacuuaa

SEQ ID NO: 1853 - RNA, 21 nt, Artificial
  synthetic
gaggaugguucauauacuuaa

SEQ ID NO: 1854 - RNA, 21 nt, Artificial
  synthetic
aggaugguucauauacuuaca

SEQ ID NO: 1855 - RNA, 21 nt, Artificial
  synthetic
aaugugaaguacaagugaaaa

SEQ ID NO: 1856 - RNA, 21 nt, Artificial
  synthetic
aaugugaaguacaagugaaaa

SEQ ID NO: 1857 - RNA, 21 nt, Artificial
  synthetic
gugaaguacaagugaaaaaca

SEQ ID NO: 1858 - RNA, 21 nt, Artificial
  synthetic
aaggaguuuuuaaaacauaca

SEQ ID NO: 1859 - RNA, 21 nt, Artificial
  synthetic
aggaguuuuuaaaacauacaa

SEQ ID NO: 1860 - RNA, 21 nt, Artificial
  synthetic
aaacauacaguccuaagugua

SEQ ID NO: 1861 - RNA, 21 nt, Artificial
  synthetic
aacauacaguccuaaguguga

SEQ ID NO: 1862 - RNA, 21 nt, Artificial
  synthetic
acauacaguccuaagugugaa

SEQ ID NO: 1863 - RNA, 21 nt, Artificial
  synthetic
gcugcacaugagaaaaguaca

SEQ ID NO: 1864 - RNA, 21 nt, Artificial
  synthetic
cugcacaugagaaaaguacaa

SEQ ID NO: 1865 - RNA, 21 nt, Artificial
  synthetic
auggagaguguuuuguucaaa

SEQ ID NO: 1866 - RNA, 21 nt, Artificial
  synthetic
ggagaguguuuuguucaaaua

SEQ ID NO: 1867 - RNA, 21 nt, Artificial
  synthetic
uuuguucaaaugcucagacua

SEQ ID NO: 1868 - RNA, 21 nt, Artificial
  synthetic
uguucaaaugcucagacuuca

SEQ ID NO: 1869 - RNA, 21 nt, Artificial
  synthetic
guucaaaugcucagacuucga

SEQ ID NO: 1870 - RNA, 21 nt, Artificial
  synthetic
uucaaaugcucagacuucgua

SEQ ID NO: 1871 - RNA, 21 nt, Artificial
  synthetic
ucaaaugcucagacuucguua

SEQ ID NO: 1872 - RNA, 21 nt, Artificial
  synthetic
caaaugcucagacuucguuga

SEQ ID NO: 1873 - RNA, 21 nt, Artificial
  synthetic
aaaugcucagacuucguugua

SEQ ID NO: 1874 - RNA, 21 nt, Artificial
  synthetic
aaugcucagacuucguuguga

SEQ ID NO: 1875 - RNA, 21 nt, Artificial
  synthetic
acauguuucgauauaaugaaa

SEQ ID NO: 1876 - RNA, 21 nt, Artificial
  synthetic
uuuaucuucauauacgguuca

SEQ ID NO: 1877 - RNA, 21 nt, Artificial
  synthetic
agggacaacucagaagaauua

SEQ ID NO: 1878 - RNA, 21 nt, Artificial
  synthetic
gggacaacucagaagaauuua

SEQ ID NO: 1879 - RNA, 21 nt, Artificial
  synthetic
ggacaacucagaagaauuuca

SEQ ID NO: 1880 - RNA, 21 nt, Artificial
  synthetic
gacaacucagaagaauuucua

SEQ ID NO: 1881 - RNA, 21 nt, Artificial
  synthetic
ugcuucucacacuucagauua

SEQ ID NO: 1882 - RNA, 21 nt, Artificial
  synthetic
gcuucucacacuucagauuua

SEQ ID NO: 1883 - RNA, 21 nt, Artificial
  synthetic
cuucucacacuucagauuuca

SEQ ID NO: 1884 - RNA, 21 nt, Artificial
  synthetic
cuucucacacuucagauuuca

SEQ ID NO: 1885 - RNA, 21 nt, Artificial
  synthetic
uucucacacuucagauuucaa

SEQ ID NO: 1886 - RNA, 21 nt, Artificial
  synthetic
uucucacacuucagauuucaa

SEQ ID NO: 1887 - RNA, 21 nt, Artificial
  synthetic
ucagaccaaagaguaguuaaa

SEQ ID NO: 1888 - RNA, 21 nt, Artificial
  synthetic
ucagaccaaagaguaguuaaa

SEQ ID NO: 1889 - RNA, 21 nt, Artificial
  synthetic
cagaccaaagaguaguuaaua

SEQ ID NO: 1890 - RNA, 21 nt, Artificial
  synthetic
cagaccaaagaguaguuaaua

SEQ ID NO: 1891 - RNA, 21 nt, Artificial
  synthetic
uagaauuuguaucccacaaua

SEQ ID NO: 1892 - RNA, 21 nt, Artificial
  synthetic
agaauuuguaucccacaauca

SEQ ID NO: 1893 - RNA, 21 nt, Artificial
  synthetic
gaauuuguaucccacaaucca

SEQ ID NO: 1894 - RNA, 21 nt, Artificial
  synthetic
gugaaacaucaccuagcuuua

SEQ ID NO: 1895 - RNA, 21 nt, Artificial
  synthetic
ugaaacaucaccuagcuuuua

SEQ ID NO: 1896 - RNA, 21 nt, Artificial
  synthetic
gaaacaucaccuagcuuuuca

SEQ ID NO: 1897 - RNA, 21 nt, Artificial
  synthetic
aaacaucaccuagcuuuucaa

SEQ ID NO: 1898 - RNA, 21 nt, Artificial
  synthetic
aacaucaccuagcuuuucaaa

SEQ ID NO: 1899 - RNA, 21 nt, Artificial
  synthetic
acaucaccuagcuuuucaaaa

SEQ ID NO: 1900 - RNA, 21 nt, Artificial
  synthetic
caucaccuagcuuuucaaaaa

SEQ ID NO: 1901 - RNA, 21 nt, Artificial
  synthetic
aucaccuagcuuuucaaaaga

SEQ ID NO: 1902 - RNA, 21 nt, Artificial
  synthetic
ucaccuagcuuuucaaaagca

SEQ ID NO: 1903 - RNA, 21 nt, Artificial
  synthetic
caccuagcuuuucaaaagcua

SEQ ID NO: 1904 - RNA, 21 nt, Artificial
  synthetic
accuagcuuuucaaaagcuga

SEQ ID NO: 1905 - RNA, 21 nt, Artificial
  synthetic
ccuagcuuuucaaaagcugaa

SEQ ID NO: 1906 - RNA, 21 nt, Artificial
  synthetic
caucugaaucuauggaucaaa

SEQ ID NO: 1907 - RNA, 21 nt, Artificial
  synthetic
aucugaaucuauggaucaaca

SEQ ID NO: 1908 - RNA, 21 nt, Artificial
  synthetic
ucugaaucuauggaucaacua

SEQ ID NO: 1909 - RNA, 21 nt, Artificial
  synthetic
ucugaaucuauggaucaacua

SEQ ID NO: 1910 - RNA, 21 nt, Artificial
  synthetic
cugaaucuauggaucaacuaa

SEQ ID NO: 1911 - RNA, 21 nt, Artificial
  synthetic
cugaaucuauggaucaacuaa

SEQ ID NO: 1912 - RNA, 21 nt, Artificial
  synthetic
aucuauggaucaacuacuaaa

SEQ ID NO: 1913 - RNA, 21 nt, Artificial
  synthetic
ucuauggaucaacuacuaaga

SEQ ID NO: 1914 - RNA, 21 nt, Artificial
  synthetic
cuauggaucaacuacuaagca

SEQ ID NO: 1915 - RNA, 21 nt, Artificial
  synthetic
uauggaucaacuacuaagcaa

SEQ ID NO: 1916 - RNA, 21 nt, Artificial
  synthetic
auggaucaacuacuaagcaaa

SEQ ID NO: 1917 - RNA, 21 nt, Artificial
  synthetic
uggaucaacuacuaagcaaaa

SEQ ID NO: 1918 - RNA, 21 nt, Artificial
  synthetic
ggaucaacuacuaagcaaaaa

SEQ ID NO: 1919 - RNA, 21 nt, Artificial
  synthetic
gaucaacuacuaagcaaaaaa

SEQ ID NO: 1920 - RNA, 21 nt, Artificial
  synthetic
aaggagaaaagucacgagaua

SEQ ID NO: 1921 - RNA, 21 nt, Artificial
  synthetic
ggaguucaacccucguucuua

SEQ ID NO: 1922 - RNA, 21 nt, Artificial
  synthetic
guucaacccucguucuuucua

SEQ ID NO: 1923 - RNA, 21 nt, Artificial
  synthetic
uucaacccucguucuuucuca

SEQ ID NO: 1924 - RNA, 21 nt, Artificial
  synthetic
ucaacccucguucuuucucua

SEQ ID NO: 1925 - RNA, 21 nt, Artificial
  synthetic
caacccucguucuuucucuca

SEQ ID NO: 1926 - RNA, 21 nt, Artificial
  synthetic
aacccucguucuuucucucaa

SEQ ID NO: 1927 - RNA, 21 nt, Artificial
  synthetic
cguucuuucucucagccaaaa

SEQ ID NO: 1928 - RNA, 21 nt, Artificial
  synthetic
guucuuucucucagccaaaga

SEQ ID NO: 1929 - RNA, 21 nt, Artificial
  synthetic
aguccugucauacaagguaaa

SEQ ID NO: 1930 - RNA, 21 nt, Artificial
  synthetic
guccugucauacaagguaaua

SEQ ID NO: 1931 - RNA, 21 nt, Artificial
  synthetic
ugucauacaagguaaugccaa

SEQ ID NO: 1932 - RNA, 21 nt, Artificial
  synthetic
gucauacaagguaaugccaga

SEQ ID NO: 1933 - RNA, 21 nt, Artificial
  synthetic
ucuacuuugccauuuccacca

SEQ ID NO: 1934 - RNA, 21 nt, Artificial
  synthetic
aagcacagaaaacuagaacua

SEQ ID NO: 1935 - RNA, 21 nt, Artificial
  synthetic
gcacagaaaacuagaacuuca

SEQ ID NO: 1936 - RNA, 21 nt, Artificial
  synthetic
acagaaaacuagaacuucaua

SEQ ID NO: 1937 - RNA, 21 nt, Artificial
  synthetic
cagaaaacuagaacuucauua

SEQ ID NO: 1938 - RNA, 21 nt, Artificial
  synthetic
ugcuugcugaaacuggaagua

SEQ ID NO: 1939 - RNA, 21 nt, Artificial
  synthetic
cugaaacuggaaguuauuuaa

SEQ ID NO: 1940 - RNA, 21 nt, Artificial
  synthetic
ugaaacuggaaguuauuuaua

SEQ ID NO: 1941 - RNA, 21 nt, Artificial
  synthetic
gaaacuggaaguuauuuauua

SEQ ID NO: 1942 - RNA, 21 nt, Artificial
  synthetic
gaaacuggaaguuauuuauua

SEQ ID NO: 1943 - RNA, 21 nt, Artificial
  synthetic
uugagagucaugaacacauca

SEQ ID NO: 1944 - RNA, 21 nt, Artificial
  synthetic
agucaugaacacaucagcuaa

SEQ ID NO: 1945 - RNA, 21 nt, Artificial
  synthetic
agucaugaacacaucagcuaa

SEQ ID NO: 1946 - RNA, 21 nt, Artificial
  synthetic
gucaugaacacaucagcuaga

SEQ ID NO: 1947 - RNA, 21 nt, Artificial
  synthetic
gucaugaacacaucagcuaga

SEQ ID NO: 1948 - RNA, 21 nt, Artificial
  synthetic
augaacacaucagcuagcaaa

SEQ ID NO: 1949 - RNA, 21 nt, Artificial
  synthetic
ugaacacaucagcuagcaaca

SEQ ID NO: 1950 - RNA, 21 nt, Artificial
  synthetic
aucagcuagcaacagaaguaa

SEQ ID NO: 1951 - RNA, 21 nt, Artificial
  synthetic
cagcuagcaacagaaguaaca

SEQ ID NO: 1952 - RNA, 21 nt, Artificial
  synthetic
cuagcaacagaaguaacaaga

SEQ ID NO: 1953 - RNA, 21 nt, Artificial
  synthetic
uagcaacagaaguaacaagaa

SEQ ID NO: 1954 - RNA, 21 nt, Artificial
  synthetic
agaaguaacaagagugauuca

SEQ ID NO: 1955 - RNA, 21 nt, Artificial
  synthetic
agaaguaacaagagugauuca

SEQ ID NO: 1956 - RNA, 21 nt, Artificial
  synthetic
cuugcugcuauuaccgcuuua

SEQ ID NO: 1957 - RNA, 21 nt, Artificial
  synthetic
gcugcuauuaccgcuuuaaaa

SEQ ID NO: 1958 - RNA, 21 nt, Artificial
  synthetic
cccuuuuacuaaacuugacaa

SEQ ID NO: 1959 - RNA, 21 nt, Artificial
  synthetic
cuuuuacuaaacuugacagaa

SEQ ID NO: 1960 - RNA, 21 nt, Artificial
  synthetic
uuuuacuaaacuugacagaaa

SEQ ID NO: 1961 - RNA, 21 nt, Artificial
  synthetic
uacuaaacuugacagaaguua

SEQ ID NO: 1962 - RNA, 21 nt, Artificial
  synthetic
cuaaacuugacagaaguucaa

SEQ ID NO: 1963 - RNA, 21 nt, Artificial
  synthetic
acuugacagaaguucaguaaa

SEQ ID NO: 1964 - RNA, 21 nt, Artificial
  synthetic
ugacagaaguucaguaaauua

SEQ ID NO: 1965 - RNA, 21 nt, Artificial
  synthetic
acagaaguucaguaaauucua

SEQ ID NO: 1966 - RNA, 21 nt, Artificial
  synthetic
cagaaguucaguaaauucuua

SEQ ID NO: 1967 - RNA, 21 nt, Artificial
  synthetic
agaaguucaguaaauucuuaa

SEQ ID NO: 1968 - RNA, 21 nt, Artificial
  synthetic
ccaaacugacggauuauuaua

SEQ ID NO: 1969 - RNA, 21 nt, Artificial
  synthetic
guuaagggaaaacuuuuacua

SEQ ID NO: 1970 - RNA, 21 nt, Artificial
  synthetic
uuaagggaaaacuuuuacuua

SEQ ID NO: 1971 - RNA, 21 nt, Artificial
  synthetic
uaagggaaaacuuuuacuuua

SEQ ID NO: 1972 - RNA, 21 nt, Artificial
  synthetic
agggaaaacuuuuacuuugua

SEQ ID NO: 1973 - RNA, 21 nt, Artificial
  synthetic
gggaaaacuuuuacuuuguaa

SEQ ID NO: 1974 - RNA, 21 nt, Artificial
  synthetic
gaaaacuuuuacuuuguagaa

SEQ ID NO: 1975 - RNA, 21 nt, Artificial
  synthetic
aaaacuuuuacuuuguagaua

SEQ ID NO: 1976 - RNA, 21 nt, Artificial
  synthetic
aaaacuuuuacuuuguagaua

SEQ ID NO: 1977 - RNA, 23 nt, Artificial
  synthetic
uacucuuuaccggaagucggagg

SEQ ID NO: 1978 - RNA, 23 nt, Artificial
  synthetic
ugacucuuuaccggaagucggag

SEQ ID NO: 1979 - RNA, 23 nt, Artificial
  synthetic
uggacucuuuaccggaagucgga

SEQ ID NO: 1980 - RNA, 23 nt, Artificial
  synthetic
uuuucacuuguacuucacauuug

SEQ ID NO: 1981 - RNA, 23 nt, Artificial
  synthetic
uuuuucacuuguacuucacauuu

SEQ ID NO: 1982 - RNA, 23 nt, Artificial
  synthetic
uauuuuucacuuguacuucacau

SEQ ID NO: 1983 - RNA, 23 nt, Artificial
  synthetic
ugauucuguacuuuucucaugug

SEQ ID NO: 1984 - RNA, 23 nt, Artificial
  synthetic
uaaucugaagugugagaagugga

SEQ ID NO: 1985 - RNA, 23 nt, Artificial
  synthetic
uaaaucugaagugugagaagugg

SEQ ID NO: 1986 - RNA, 23 nt, Artificial
  synthetic
ugaaaucugaagugugagaagug

SEQ ID NO: 1987 - RNA, 23 nt, Artificial
  synthetic
uugaaaucugaagugugagaagu

SEQ ID NO: 1988 - RNA, 23 nt, Artificial
  synthetic
uuugaaaucugaagugugagaag

SEQ ID NO: 1989 - RNA, 23 nt, Artificial
  synthetic
uguugaaaucugaagugugagaa

SEQ ID NO: 1990 - RNA, 23 nt, Artificial
  synthetic
ugguugaaaucugaagugugaga

SEQ ID NO: 1991 - RNA, 23 nt, Artificial
  synthetic
uggguugaaaucugaagugugag

SEQ ID NO: 1992 - RNA, 23 nt, Artificial
  synthetic
uuucggguugaaaucugaagugu

SEQ ID NO: 1993 - RNA, 23 nt, Artificial
  synthetic
uuuaacuacucuuuggucugaac

SEQ ID NO: 1994 - RNA, 23 nt, Artificial
  synthetic
uauuaacuacucuuuggucugaa

SEQ ID NO: 1995 - RNA, 23 nt, Artificial
  synthetic
uugcguuuaggcauaguagagac

SEQ ID NO: 1996 - RNA, 23 nt, Artificial
  synthetic
uaugcguuuaggcauaguagaga

SEQ ID NO: 1997 - RNA, 23 nt, Artificial
  synthetic
uacaugcguuuaggcauaguaga

SEQ ID NO: 1998 - RNA, 23 nt, Artificial
  synthetic
uuugauccauagauucagaagua

SEQ ID NO: 1999 - RNA, 23 nt, Artificial
  synthetic
uguugauccauagauucagaagu

SEQ ID NO: 2000 - RNA, 23 nt, Artificial
  synthetic
uaguugauccauagauucagaag

SEQ ID NO: 2001 - RNA, 23 nt, Artificial
  synthetic
uuaguugauccauagauucagaa

SEQ ID NO: 2002 - RNA, 23 nt, Artificial
  synthetic
uguaguugauccauagauucaga

SEQ ID NO: 2003 - RNA, 23 nt, Artificial
  synthetic
uaguaguugauccauagauucag

SEQ ID NO: 2004 - RNA, 23 nt, Artificial
  synthetic
uuaguaguugauccauagauuca

SEQ ID NO: 2005 - RNA, 23 nt, Artificial
  synthetic
uuuaguaguugauccauagauuc

SEQ ID NO: 2006 - RNA, 23 nt, Artificial
  synthetic
ucgucauagguauuggguauaaa

SEQ ID NO: 2007 - RNA, 23 nt, Artificial
  synthetic
uuugguacugcucuauaugucuu

SEQ ID NO: 2008 - RNA, 23 nt, Artificial
  synthetic
uuauuugguacugcucuauaugu

SEQ ID NO: 2009 - RNA, 23 nt, Artificial
  synthetic
uauauuugguacugcucuauaug

SEQ ID NO: 2010 - RNA, 23 nt, Artificial
  synthetic
ucauauuugguacugcucuauau

SEQ ID NO: 2011 - RNA, 23 nt, Artificial
  synthetic
uggcauauuugguacugcucuau

SEQ ID NO: 2012 - RNA, 23 nt, Artificial
  synthetic
uuuguaugguaauuugggacaug

SEQ ID NO: 2013 - RNA, 23 nt, Artificial
  synthetic
uuguuguaugguaauuugggaca

SEQ ID NO: 2014 - RNA, 23 nt, Artificial
  synthetic
ucaaaguagaaagaagggcuugu

SEQ ID NO: 2015 - RNA, 23 nt, Artificial
  synthetic
uuggcaaaguagaaagaagggcu

SEQ ID NO: 2016 - RNA, 23 nt, Artificial
  synthetic
uauggcaaaguagaaagaagggc

SEQ ID NO: 2017 - RNA, 23 nt, Artificial
  synthetic
uaauggcaaaguagaaagaaggg

SEQ ID NO: 2018 - RNA, 23 nt, Artificial
  synthetic
uaaauggcaaaguagaaagaagg

SEQ ID NO: 2019 - RNA, 23 nt, Artificial
  synthetic
ugaaauggcaaaguagaaagaag

SEQ ID NO: 2020 - RNA, 23 nt, Artificial
  synthetic
uggaaauggcaaaguagaaagaa

SEQ ID NO: 2021 - RNA, 23 nt, Artificial
  synthetic
uuggaaauggcaaaguagaaaga

SEQ ID NO: 2022 - RNA, 23 nt, Artificial
  synthetic
uguggaaauggcaaaguagaaag

SEQ ID NO: 2023 - RNA, 23 nt, Artificial
  synthetic
uaccauuccugacuguacaugag

SEQ ID NO: 2024 - RNA, 23 nt, Artificial
  synthetic
uaaccauuccugacuguacauga

SEQ ID NO: 2025 - RNA, 23 nt, Artificial
  synthetic
ugaaccauuccugacuguacaug

SEQ ID NO: 2026 - RNA, 23 nt, Artificial
  synthetic
uaugagaaggaaccauuccugac

SEQ ID NO: 2027 - RNA, 23 nt, Artificial
  synthetic
uuggaugagaaggaaccauuccu

SEQ ID NO: 2028 - RNA, 23 nt, Artificial
  synthetic
uguuggaugagaaggaaccauuc

SEQ ID NO: 2029 - RNA, 23 nt, Artificial
  synthetic
uaguuggaugagaaggaaccauu

SEQ ID NO: 2030 - RNA, 23 nt, Artificial
  synthetic
ugcaguuggaugagaaggaacca

SEQ ID NO: 2031 - RNA, 23 nt, Artificial
  synthetic
uauuagcaucauuggcgcauggg

SEQ ID NO: 2032 - RNA, 23 nt, Artificial
  synthetic
ugucauuagcaucauuggcgcau

SEQ ID NO: 2033 - RNA, 23 nt, Artificial
  synthetic
uucgucauuagcaucauuggcgc

SEQ ID NO: 2034 - RNA, 23 nt, Artificial
  synthetic
ugucgucauuagcaucauuggcg

SEQ ID NO: 2035 - RNA, 23 nt, Artificial
  synthetic
uugugucgucauuagcaucauug

SEQ ID NO: 2036 - RNA, 23 nt, Artificial
  synthetic
ucugugucgucauuagcaucauu

SEQ ID NO: 2037 - RNA, 23 nt, Artificial
  synthetic
ugcuguagugcacuuugagcgag

SEQ ID NO: 2038 - RNA, 23 nt, Artificial
  synthetic
uugucgagacuggaaugggcugu

SEQ ID NO: 2039 - RNA, 23 nt, Artificial
  synthetic
uguugucgagacuggaaugggcu

SEQ ID NO: 2040 - RNA, 23 nt, Artificial
  synthetic
uuacaacugcuguuggugguggg

SEQ ID NO: 2041 - RNA, 23 nt, Artificial
  synthetic
uuuacaacugcuguugguggugg

SEQ ID NO: 2042 - RNA, 23 nt, Artificial
  synthetic
ucuuacaacugcuguugguggug

SEQ ID NO: 2043 - RNA, 23 nt, Artificial
  synthetic
ugccuuacaacugcuguuggugg

SEQ ID NO: 2044 - RNA, 23 nt, Artificial
  synthetic
ucagccuuacaacugcuguuggu

SEQ ID NO: 2045 - RNA, 23 nt, Artificial
  synthetic
uguugguagaagcaguagaaggg

SEQ ID NO: 2046 - RNA, 23 nt, Artificial
  synthetic
ucaguugguagaagcaguagaag

SEQ ID NO: 2047 - RNA, 23 nt, Artificial
  synthetic
uccaguugguagaagcaguagaa

SEQ ID NO: 2048 - RNA, 23 nt, Artificial
  synthetic
ucuuccaguugguagaagcagua

SEQ ID NO: 2049 - RNA, 23 nt, Artificial
  synthetic
uguuuucugugcuuccaguuggu

SEQ ID NO: 2050 - RNA, 23 nt, Artificial
  synthetic
uuggauguuacaagaaaucaaca

SEQ ID NO: 2051 - RNA, 23 nt, Artificial
  synthetic
uuauuggauguuacaagaaauca

SEQ ID NO: 2052 - RNA, 23 nt, Artificial
  synthetic
uccuauuggauguuacaagaaau

SEQ ID NO: 2053 - RNA, 23 nt, Artificial
  synthetic
uuccuauuggauguuacaagaaa

SEQ ID NO: 2054 - RNA, 23 nt, Artificial
  synthetic
ucauuccuauuggauguuacaag

SEQ ID NO: 2055 - RNA, 23 nt, Artificial
  synthetic
uagcauuccuauuggauguuaca

SEQ ID NO: 2056 - RNA, 23 nt, Artificial
  synthetic
uuagcauuccuauuggauguuac

SEQ ID NO: 2057 - RNA, 23 nt, Artificial
  synthetic
uuuagcauuccuauuggauguua

SEQ ID NO: 2058 - RNA, 23 nt, Artificial
  synthetic
uguuagcauuccuauuggauguu

SEQ ID NO: 2059 - RNA, 23 nt, Artificial
  synthetic
ugaacuguuagcauuccuauugg

SEQ ID NO: 2060 - RNA, 23 nt, Artificial
  synthetic
uugaacuguuagcauuccuauug

SEQ ID NO: 2061 - RNA, 23 nt, Artificial
  synthetic
ugugaacuguuagcauuccuauu

SEQ ID NO: 2062 - RNA, 23 nt, Artificial
  synthetic
uagugaacuguuagcauuccuau

SEQ ID NO: 2063 - RNA, 23 nt, Artificial
  synthetic
uaagugaacuguuagcauuccua

SEQ ID NO: 2064 - RNA, 23 nt, Artificial
  synthetic
ucaagugaacuguuagcauuccu

SEQ ID NO: 2065 - RNA, 23 nt, Artificial
  synthetic
uacugcaagugaacuguuagcau

SEQ ID NO: 2066 - RNA, 23 nt, Artificial
  synthetic
ucuuccacugcaagugaacuguu

SEQ ID NO: 2067 - RNA, 23 nt, Artificial
  synthetic
ucuaaaugccucuacucggucca

SEQ ID NO: 2068 - RNA, 23 nt, Artificial
  synthetic
uccuaaaugccucuacucggucc

SEQ ID NO: 2069 - RNA, 23 nt, Artificial
  synthetic
uuauggaauuauggaauagcccc

SEQ ID NO: 2070 - RNA, 23 nt, Artificial
  synthetic
uaauaacuuccaguuucggcaag

SEQ ID NO: 2071 - RNA, 23 nt, Artificial
  synthetic
uuaaauaacuuccaguuucggca

SEQ ID NO: 2072 - RNA, 23 nt, Artificial
  synthetic
uauaaauaacuuccaguuucggc

SEQ ID NO: 2073 - RNA, 23 nt, Artificial
  synthetic
uaauaaauaacuuccaguuucgg

SEQ ID NO: 2074 - RNA, 23 nt, Artificial
  synthetic
uaaauaaauaacuuccaguuucg

SEQ ID NO: 2075 - RNA, 23 nt, Artificial
  synthetic
uaugacuuucaaggguuauuaaa

SEQ ID NO: 2076 - RNA, 23 nt, Artificial
  synthetic
ucaugacuuucaaggguuauuaa

SEQ ID NO: 2077 - RNA, 23 nt, Artificial
  synthetic
uguucaugacuuucaaggguuau

SEQ ID NO: 2078 - RNA, 23 nt, Artificial
  synthetic
uauguguucaugacuuucaaggg

SEQ ID NO: 2079 - RNA, 23 nt, Artificial
  synthetic
uuagcugauguguucaugacuuu

SEQ ID NO: 2080 - RNA, 23 nt, Artificial
  synthetic
ucuagcugauguguucaugacuu

SEQ ID NO: 2081 - RNA, 23 nt, Artificial
  synthetic
ugcuagcugauguguucaugacu

SEQ ID NO: 2082 - RNA, 23 nt, Artificial
  synthetic
uugcuagcugauguguucaugac

SEQ ID NO: 2083 - RNA, 23 nt, Artificial
  synthetic
uugcuagcugauguguucaugac

SEQ ID NO: 2084 - RNA, 23 nt, Artificial
  synthetic
uuugcuagcugauguguucauga

SEQ ID NO: 2085 - RNA, 23 nt, Artificial
  synthetic
uuuugcuagcugauguguucaug

SEQ ID NO: 2086 - RNA, 23 nt, Artificial
  synthetic
uuuuugcuagcugauguguucau

SEQ ID NO: 2087 - RNA, 23 nt, Artificial
  synthetic
ucuuuugcuagcugauguguuca

SEQ ID NO: 2088 - RNA, 23 nt, Artificial
  synthetic
uacuucuuuugcuagcugaugug

SEQ ID NO: 2089 - RNA, 23 nt, Artificial
  synthetic
ucuuguuacuucuuuugcuagcu

SEQ ID NO: 2090 - RNA, 23 nt, Artificial
  synthetic
ugcaagaaucacucuuguuacuu

SEQ ID NO: 2091 - RNA, 23 nt, Artificial
  synthetic
uagcaagaaucacucuuguuacu

SEQ ID NO: 2092 - RNA, 23 nt, Artificial
  synthetic
ucagcaagaaucacucuuguuac

SEQ ID NO: 2093 - RNA, 23 nt, Artificial
  synthetic
uauagcagcaagaaucacucuug

SEQ ID NO: 2094 - RNA, 23 nt, Artificial
  synthetic
uaauagcagcaagaaucacucuu

SEQ ID NO: 2095 - RNA, 23 nt, Artificial
  synthetic
uguaauagcagcaagaaucacuc

SEQ ID NO: 2096 - RNA, 23 nt, Artificial
  synthetic
uuuaguaaaagggcguuccaagu

SEQ ID NO: 2097 - RNA, 23 nt, Artificial
  synthetic
uuuuaguaaaagggcguuccaag

SEQ ID NO: 2098 - RNA, 23 nt, Artificial
  synthetic
uaguuuaguaaaagggcguucca

SEQ ID NO: 2099 - RNA, 23 nt, Artificial
  synthetic
uaaguuuaguaaaagggcguucc

SEQ ID NO: 2100 - RNA, 23 nt, Artificial
  synthetic
ucaaguuuaguaaaagggcguuc

SEQ ID NO: 2101 - RNA, 23 nt, Artificial
  synthetic
uucaaguuuaguaaaagggcguu

SEQ ID NO: 2102 - RNA, 23 nt, Artificial
  synthetic
ucgguaagaauuuacugaaacuu

SEQ ID NO: 2103 - RNA, 23 nt, Artificial
  synthetic
uacgguaagaauuuacugaaacu

SEQ ID NO: 2104 - RNA, 23 nt, Artificial
  synthetic
ugacgguaagaauuuacugaaac

SEQ ID NO: 2105 - RNA, 23 nt, Artificial
  synthetic
uugacgguaagaauuuacugaaa

SEQ ID NO: 2106 - RNA, 23 nt, Artificial
  synthetic
uuugacgguaagaauuuacugaa

SEQ ID NO: 2107 - RNA, 23 nt, Artificial
  synthetic
uuuugacgguaagaauuuacuga

SEQ ID NO: 2108 - RNA, 23 nt, Artificial
  synthetic
uguuugacgguaagaauuuacug

SEQ ID NO: 2109 - RNA, 23 nt, Artificial
  synthetic
uaguuugacgguaagaauuuacu

SEQ ID NO: 2110 - RNA, 23 nt, Artificial
  synthetic
ucaguuugacgguaagaauuuac

SEQ ID NO: 2111 - RNA, 23 nt, Artificial
  synthetic
uucaguuugacgguaagaauuua

SEQ ID NO: 2112 - RNA, 23 nt, Artificial
  synthetic
ugucaguuugacgguaagaauuu

SEQ ID NO: 2113 - RNA, 23 nt, Artificial
  synthetic
ucgucaguuugacgguaagaauu

SEQ ID NO: 2114 - RNA, 23 nt, Artificial
  synthetic
uccgucaguuugacgguaagaau

SEQ ID NO: 2115 - RNA, 23 nt, Artificial
  synthetic
uuccgucaguuugacgguaagaa

SEQ ID NO: 2116 - RNA, 23 nt, Artificial
  synthetic
uauccgucaguuugacgguaaga

SEQ ID NO: 2117 - RNA, 23 nt, Artificial
  synthetic
uaauccgucaguuugacgguaag

SEQ ID NO: 2118 - RNA, 23 nt, Artificial
  synthetic
uaauccgucaguuugacgguaag

SEQ ID NO: 2119 - RNA, 23 nt, Artificial
  synthetic
uuaauccgucaguuugacgguaa

SEQ ID NO: 2120 - RNA, 23 nt, Artificial
  synthetic
uuaaauaauaauccgucaguuug

SEQ ID NO: 2121 - RNA, 23 nt, Artificial
  synthetic
uagugaucaccucaucaaacuug

SEQ ID NO: 2122 - RNA, 23 nt, Artificial
  synthetic
uguugaaccacuguagacaguga

SEQ ID NO: 2123 - RNA, 23 nt, Artificial
  synthetic
uaguugaaccacuguagacagug

SEQ ID NO: 2124 - RNA, 23 nt, Artificial
  synthetic
uuaaaaguugaaccacuguagac

SEQ ID NO: 2125 - RNA, 23 nt, Artificial
  synthetic
uuuaaaaguugaaccacuguaga

SEQ ID NO: 2126 - RNA, 23 nt, Artificial
  synthetic
uucccuuaacuuaaaaguugaac

SEQ ID NO: 2127 - RNA, 23 nt, Artificial
  synthetic
uuuucccuuaacuuaaaaguuga

SEQ ID NO: 2128 - RNA, 23 nt, Artificial
  synthetic
uucuacaaaguaaaaguuuuucc

SEQ ID NO: 2129 - RNA, 23 nt, Artificial
  synthetic
uaaaagaaaucguagacugaggc

SEQ ID NO: 2130 - RNA, 23 nt, Artificial
  synthetic
ucaaaagaaaucguagacugagg

SEQ ID NO: 2131 - RNA, 23 nt, Artificial
  synthetic
uucaaaagaaaucguagacugag

SEQ ID NO: 2132 - RNA, 23 nt, Artificial
  synthetic
ugauucuguacuuuucucaugug

SEQ ID NO: 2133 - RNA, 23 nt, Artificial
  synthetic
ugauucuguacuuuucucaugug

SEQ ID NO: 2134 - RNA, 23 nt, Artificial
  synthetic
uacaacaaagucugaacauuuga

SEQ ID NO: 2135 - RNA, 23 nt, Artificial
  synthetic
uucacuuuagcacugauagcaga

SEQ ID NO: 2136 - RNA, 23 nt, Artificial
  synthetic
uagauaaacugcuaucauacgua

SEQ ID NO: 2137 - RNA, 23 nt, Artificial
  synthetic
uaagauaaacugcuaucauacgu

SEQ ID NO: 2138 - RNA, 23 nt, Artificial
  synthetic
uaaaaauucuucugaguuaucuc

SEQ ID NO: 2139 - RNA, 23 nt, Artificial
  synthetic
ucugaagugugagaaguggaucu

SEQ ID NO: 2140 - RNA, 23 nt, Artificial
  synthetic
uuugaaaucugaagugugagaag

SEQ ID NO: 2141 - RNA, 23 nt, Artificial
  synthetic
uugcguuuaggcauaguagagac

SEQ ID NO: 2142 - RNA, 23 nt, Artificial
  synthetic
uaugcguuuaggcauaguagaga

SEQ ID NO: 2143 - RNA, 23 nt, Artificial
  synthetic
ucagaaacucugugauuucgagg

SEQ ID NO: 2144 - RNA, 23 nt, Artificial
  synthetic
ugcagaaacucugugauuucgag

SEQ ID NO: 2145 - RNA, 23 nt, Artificial
  synthetic
ucauagauucagaaguagaacuu

SEQ ID NO: 2146 - RNA, 23 nt, Artificial
  synthetic
uccauagauucagaaguagaacu

SEQ ID NO: 2147 - RNA, 23 nt, Artificial
  synthetic
uuccauagauucagaaguagaac

SEQ ID NO: 2148 - RNA, 23 nt, Artificial
  synthetic
uauccauagauucagaaguagaa

SEQ ID NO: 2149 - RNA, 23 nt, Artificial
  synthetic
uguaguugauccauagauucaga

SEQ ID NO: 2150 - RNA, 23 nt, Artificial
  synthetic
uguaguugauccauagauucaga

SEQ ID NO: 2151 - RNA, 23 nt, Artificial
  synthetic
ucucuauuuuuguuuaguaguug

SEQ ID NO: 2152 - RNA, 23 nt, Artificial
  synthetic
uaagaauccuuagcacuugguuc

SEQ ID NO: 2153 - RNA, 23 nt, Artificial
  synthetic
uauucaauguugauuuccuaacu

SEQ ID NO: 2154 - RNA, 23 nt, Artificial
  synthetic
uaguauaaacuggaguuggcugu

SEQ ID NO: 2155 - RNA, 23 nt, Artificial
  synthetic
ucguacugaguugcugaagaaga

SEQ ID NO: 2156 - RNA, 23 nt, Artificial
  synthetic
uuggaaauggcaaaguagaaaga

SEQ ID NO: 2157 - RNA, 23 nt, Artificial
  synthetic
uguggaaauggcaaaguagaaag

SEQ ID NO: 2158 - RNA, 23 nt, Artificial
  synthetic
uuccuauuggauguuacaagaaa

SEQ ID NO: 2159 - RNA, 23 nt, Artificial
  synthetic
uuaaauaacuuccaguuucggca

SEQ ID NO: 2160 - RNA, 23 nt, Artificial
  synthetic
uuaaauaacuuccaguuucggca

SEQ ID NO: 2161 - RNA, 23 nt, Artificial
  synthetic
uuaaauaacuuccaguuucggca

SEQ ID NO: 2162 - RNA, 23 nt, Artificial
  synthetic
uaaauaaauaacuuccaguuucg

SEQ ID NO: 2163 - RNA, 23 nt, Artificial
  synthetic
uauguguucaugacuuucaaggg

SEQ ID NO: 2164 - RNA, 23 nt, Artificial
  synthetic
uauguguucaugacuuucaaggg

SEQ ID NO: 2165 - RNA, 23 nt, Artificial
  synthetic
uuagcugauguguucaugacuuu

SEQ ID NO: 2166 - RNA, 23 nt, Artificial
  synthetic
uuagcugauguguucaugacuuu

SEQ ID NO: 2167 - RNA, 23 nt, Artificial
  synthetic
uuagcugauguguucaugacuuu

SEQ ID NO: 2168 - RNA, 23 nt, Artificial
  synthetic
ucuagcugauguguucaugacuu

SEQ ID NO: 2169 - RNA, 23 nt, Artificial
  synthetic
ucuagcugauguguucaugacuu

SEQ ID NO: 2170 - RNA, 23 nt, Artificial
  synthetic
uugcuagcugauguguucaugac

SEQ ID NO: 2171 - RNA, 23 nt, Artificial
  synthetic
uauagcagcaagaaucacucuug

SEQ ID NO: 2172 - RNA, 23 nt, Artificial
  synthetic
uauagcagcaagaaucacucuug

SEQ ID NO: 2173 - RNA, 23 nt, Artificial
  synthetic
uguaauagcagcaagaaucacuc

SEQ ID NO: 2174 - RNA, 23 nt, Artificial
  synthetic
uguaauagcagcaagaaucacuc

SEQ ID NO: 2175 - RNA, 23 nt, Artificial
  synthetic
uucaaguuuaguaaaagggcguu

SEQ ID NO: 2176 - RNA, 23 nt, Artificial
  synthetic
uucaaguuuaguaaaagggcguu

SEQ ID NO: 2177 - RNA, 23 nt, Artificial
  synthetic
uaauccgucaguuugacgguaag

SEQ ID NO: 2178 - RNA, 23 nt, Artificial
  synthetic
uguugaaccacuguagacaguga

SEQ ID NO: 2179 - RNA, 23 nt, Artificial
  synthetic
uguugaaccacuguagacaguga

SEQ ID NO: 2180 - RNA, 23 nt, Artificial
  synthetic
uaacuuaaaaguugaaccacugu

SEQ ID NO: 2181 - RNA, 23 nt, Artificial
  synthetic
uuaacuuaaaaguugaaccacug

SEQ ID NO: 2182 - RNA, 23 nt, Artificial
  synthetic
uaaguaaaaguuuuucccuuaac

SEQ ID NO: 2183 - RNA, 23 nt, Artificial
  synthetic
uaaagaaaucguaggcugaggca

SEQ ID NO: 2184 - RNA, 23 nt, Artificial
  synthetic
uaaaagaaaucguaggcugaggc

SEQ ID NO: 2185 - RNA, 23 nt, Artificial
  synthetic
ucaaaagaaaucguaggcugagg

SEQ ID NO: 2186 - RNA, 23 nt, Artificial
  synthetic
uuaaguauaugaaccauccucac

SEQ ID NO: 2187 - RNA, 23 nt, Artificial
  synthetic
uuaaguauaugaaccauccucac

SEQ ID NO: 2188 - RNA, 23 nt, Artificial
  synthetic
uguaaguauaugaaccauccuca

SEQ ID NO: 2189 - RNA, 23 nt, Artificial
  synthetic
uuuucacuuguacuucacauuuc

SEQ ID NO: 2190 - RNA, 23 nt, Artificial
  synthetic
uuuucacuuguacuucacauuuc

SEQ ID NO: 2191 - RNA, 23 nt, Artificial
  synthetic
uguuuuucacuuguacuucacau

SEQ ID NO: 2192 - RNA, 23 nt, Artificial
  synthetic
uguauguuuuaaaaacuccuuca

SEQ ID NO: 2193 - RNA, 23 nt, Artificial
  synthetic
uuguauguuuuaaaaacuccuuc

SEQ ID NO: 2194 - RNA, 23 nt, Artificial
  synthetic
uacacuuaggacuguauguuuua

SEQ ID NO: 2195 - RNA, 23 nt, Artificial
  synthetic
ucacacuuaggacuguauguuuu

SEQ ID NO: 2196 - RNA, 23 nt, Artificial
  synthetic
uucacacuuaggacuguauguuu

SEQ ID NO: 2197 - RNA, 23 nt, Artificial
  synthetic
uguacuuuucucaugugcagcau

SEQ ID NO: 2198 - RNA, 23 nt, Artificial
  synthetic
uuguacuuuucucaugugcagca

SEQ ID NO: 2199 - RNA, 23 nt, Artificial
  synthetic
uuugaacaaaacacucuccauua

SEQ ID NO: 2200 - RNA, 23 nt, Artificial
  synthetic
uauuugaacaaaacacucuccau

SEQ ID NO: 2201 - RNA, 23 nt, Artificial
  synthetic
uagucugagcauuugaacaaaac

SEQ ID NO: 2202 - RNA, 23 nt, Artificial
  synthetic
ugaagucugagcauuugaacaaa

SEQ ID NO: 2203 - RNA, 23 nt, Artificial
  synthetic
ucgaagucugagcauuugaacaa

SEQ ID NO: 2204 - RNA, 23 nt, Artificial
  synthetic
uacgaagucugagcauuugaaca

SEQ ID NO: 2205 - RNA, 23 nt, Artificial
  synthetic
uaacgaagucugagcauuugaac

SEQ ID NO: 2206 - RNA, 23 nt, Artificial
  synthetic
ucaacgaagucugagcauuugaa

SEQ ID NO: 2207 - RNA, 23 nt, Artificial
  synthetic
uacaacgaagucugagcauuuga

SEQ ID NO: 2208 - RNA, 23 nt, Artificial
  synthetic
ucacaacgaagucugagcauuug

SEQ ID NO: 2209 - RNA, 23 nt, Artificial
  synthetic
uuucauuauaucgaaacauguca

SEQ ID NO: 2210 - RNA, 23 nt, Artificial
  synthetic
ugaaccguauaugaagauaaacu

SEQ ID NO: 2211 - RNA, 23 nt, Artificial
  synthetic
uaauucuucugaguugucccuuu

SEQ ID NO: 2212 - RNA, 23 nt, Artificial
  synthetic
uaaauucuucugaguugucccuu

SEQ ID NO: 2213 - RNA, 23 nt, Artificial
  synthetic
ugaaauucuucugaguugucccu

SEQ ID NO: 2214 - RNA, 23 nt, Artificial
  synthetic
uagaaauucuucugaguuguccc

SEQ ID NO: 2215 - RNA, 23 nt, Artificial
  synthetic
uaaucugaagugugagaagcagc

SEQ ID NO: 2216 - RNA, 23 nt, Artificial
  synthetic
uaaaucugaagugugagaagcag

SEQ ID NO: 2217 - RNA, 23 nt, Artificial
  synthetic
ugaaaucugaagugugagaagca

SEQ ID NO: 2218 - RNA, 23 nt, Artificial
  synthetic
ugaaaucugaagugugagaagca

SEQ ID NO: 2219 - RNA, 23 nt, Artificial
  synthetic
uugaaaucugaagugugagaagc

SEQ ID NO: 2220 - RNA, 23 nt, Artificial
  synthetic
uugaaaucugaagugugagaagc

SEQ ID NO: 2221 - RNA, 23 nt, Artificial
  synthetic
uuuaacuacucuuuggucugagc

SEQ ID NO: 2222 - RNA, 23 nt, Artificial
  synthetic
uuuaacuacucuuuggucugagc

SEQ ID NO: 2223 - RNA, 23 nt, Artificial
  synthetic
uauuaacuacucuuuggucugag

SEQ ID NO: 2224 - RNA, 23 nt, Artificial
  synthetic
uauuaacuacucuuuggucugag

SEQ ID NO: 2225 - RNA, 23 nt, Artificial
  synthetic
uauugugggauacaaauucuagg

SEQ ID NO: 2226 - RNA, 23 nt, Artificial
  synthetic
ugauugugggauacaaauucuag

SEQ ID NO: 2227 - RNA, 23 nt, Artificial
  synthetic
uggauugugggauacaaauucua

SEQ ID NO: 2228 - RNA, 23 nt, Artificial
  synthetic
uaaagcuaggugauguuucacuu

SEQ ID NO: 2229 - RNA, 23 nt, Artificial
  synthetic
uaaaagcuaggugauguuucacu

SEQ ID NO: 2230 - RNA, 23 nt, Artificial
  synthetic
ugaaaagcuaggugauguuucac

SEQ ID NO: 2231 - RNA, 23 nt, Artificial
  synthetic
uugaaaagcuaggugauguuuca

SEQ ID NO: 2232 - RNA, 23 nt, Artificial
  synthetic
uuugaaaagcuaggugauguuuc

SEQ ID NO: 2233 - RNA, 23 nt, Artificial
  synthetic
uuuugaaaagcuaggugauguuu

SEQ ID NO: 2234 - RNA, 23 nt, Artificial
  synthetic
uuuuugaaaagcuaggugauguu

SEQ ID NO: 2235 - RNA, 23 nt, Artificial
  synthetic
ucuuuugaaaagcuaggugaugu

SEQ ID NO: 2236 - RNA, 23 nt, Artificial
  synthetic
ugcuuuugaaaagcuaggugaug

SEQ ID NO: 2237 - RNA, 23 nt, Artificial
  synthetic
uagcuuuugaaaagcuaggugau

SEQ ID NO: 2238 - RNA, 23 nt, Artificial
  synthetic
ucagcuuuugaaaagcuagguga

SEQ ID NO: 2239 - RNA, 23 nt, Artificial
  synthetic
uucagcuuuugaaaagcuaggug

SEQ ID NO: 2240 - RNA, 23 nt, Artificial
  synthetic
uuugauccauagauucagaugua

SEQ ID NO: 2241 - RNA, 23 nt, Artificial
  synthetic
uguugauccauagauucagaugu

SEQ ID NO: 2242 - RNA, 23 nt, Artificial
  synthetic
uaguugauccauagauucagaug

SEQ ID NO: 2243 - RNA, 23 nt, Artificial
  synthetic
uaguugauccauagauucagaug

SEQ ID NO: 2244 - RNA, 23 nt, Artificial
  synthetic
uuaguugauccauagauucagau

SEQ ID NO: 2245 - RNA, 23 nt, Artificial
  synthetic
uuaguugauccauagauucagau

SEQ ID NO: 2246 - RNA, 23 nt, Artificial
  synthetic
uuuaguaguugauccauagauuc

SEQ ID NO: 2247 - RNA, 23 nt, Artificial
  synthetic
ucuuaguaguugauccauagauu

SEQ ID NO: 2248 - RNA, 23 nt, Artificial
  synthetic
ugcuuaguaguugauccauagau

SEQ ID NO: 2249 - RNA, 23 nt, Artificial
  synthetic
uugcuuaguaguugauccauaga

SEQ ID NO: 2250 - RNA, 23 nt, Artificial
  synthetic
uuugcuuaguaguugauccauag

SEQ ID NO: 2251 - RNA, 23 nt, Artificial
  synthetic
uuuugcuuaguaguugauccaua

SEQ ID NO: 2252 - RNA, 23 nt, Artificial
  synthetic
uuuuugcuuaguaguugauccau

SEQ ID NO: 2253 - RNA, 23 nt, Artificial
  synthetic
uuuuuugcuuaguaguugaucca

SEQ ID NO: 2254 - RNA, 23 nt, Artificial
  synthetic
uaucucgugacuuuucuccuucu

SEQ ID NO: 2255 - RNA, 23 nt, Artificial
  synthetic
uaagaacgaggguugaacuccuu

SEQ ID NO: 2256 - RNA, 23 nt, Artificial
  synthetic
uagaaagaacgaggguugaacuc

SEQ ID NO: 2257 - RNA, 23 nt, Artificial
  synthetic
ugagaaagaacgaggguugaacu

SEQ ID NO: 2258 - RNA, 23 nt, Artificial
  synthetic
uagagaaagaacgaggguugaac

SEQ ID NO: 2259 - RNA, 23 nt, Artificial
  synthetic
ugagagaaagaacgaggguugaa

SEQ ID NO: 2260 - RNA, 23 nt, Artificial
  synthetic
uugagagaaagaacgaggguuga

SEQ ID NO: 2261 - RNA, 23 nt, Artificial
  synthetic
uuuuggcugagagaaagaacgag

SEQ ID NO: 2262 - RNA, 23 nt, Artificial
  synthetic
ucuuuggcugagagaaagaacga

SEQ ID NO: 2263 - RNA, 23 nt, Artificial
  synthetic
uuuaccuuguaugacaggacugu

SEQ ID NO: 2264 - RNA, 23 nt, Artificial
  synthetic
uauuaccuuguaugacaggacug

SEQ ID NO: 2265 - RNA, 23 nt, Artificial
  synthetic
uuggcauuaccuuguaugacagg

SEQ ID NO: 2266 - RNA, 23 nt, Artificial
  synthetic
ucuggcauuaccuuguaugacag

SEQ ID NO: 2267 - RNA, 23 nt, Artificial
  synthetic
ugguggaaauggcaaaguagaaa

SEQ ID NO: 2268 - RNA, 23 nt, Artificial
  synthetic
uaguucuaguuuucugugcuucc

SEQ ID NO: 2269 - RNA, 23 nt, Artificial
  synthetic
ugaaguucuaguuuucugugcuu

SEQ ID NO: 2270 - RNA, 23 nt, Artificial
  synthetic
uaugaaguucuaguuuucugugc

SEQ ID NO: 2271 - RNA, 23 nt, Artificial
  synthetic
uaaugaaguucuaguuuucugug

SEQ ID NO: 2272 - RNA, 23 nt, Artificial
  synthetic
uacuuccaguuucagcaagcaga

SEQ ID NO: 2273 - RNA, 23 nt, Artificial
  synthetic
uuaaauaacuuccaguuucagca

SEQ ID NO: 2274 - RNA, 23 nt, Artificial
  synthetic
uauaaauaacuuccaguuucagc

SEQ ID NO: 2275 - RNA, 23 nt, Artificial
  synthetic
uaauaaauaacuuccaguuucag

SEQ ID NO: 2276 - RNA, 23 nt, Artificial
  synthetic
uaauaaauaacuuccaguuucag

SEQ ID NO: 2277 - RNA, 23 nt, Artificial
  synthetic
ugauguguucaugacucucaagg

SEQ ID NO: 2278 - RNA, 23 nt, Artificial
  synthetic
uuagcugauguguucaugacucu

SEQ ID NO: 2279 - RNA, 23 nt, Artificial
  synthetic
uuagcugauguguucaugacucu

SEQ ID NO: 2280 - RNA, 23 nt, Artificial
  synthetic
ucuagcugauguguucaugacuc

SEQ ID NO: 2281 - RNA, 23 nt, Artificial
  synthetic
ucuagcugauguguucaugacuc

SEQ ID NO: 2282 - RNA, 23 nt, Artificial
  synthetic
uuugcuagcugauguguucauga

SEQ ID NO: 2283 - RNA, 23 nt, Artificial
  synthetic
uguugcuagcugauguguucaug

SEQ ID NO: 2284 - RNA, 23 nt, Artificial
  synthetic
uuacuucuguugcuagcugaugu

SEQ ID NO: 2285 - RNA, 23 nt, Artificial
  synthetic
uguuacuucuguugcuagcugau

SEQ ID NO: 2286 - RNA, 23 nt, Artificial
  synthetic
ucuuguuacuucuguugcuagcu

SEQ ID NO: 2287 - RNA, 23 nt, Artificial
  synthetic
uucuuguuacuucuguugcuagc

SEQ ID NO: 2288 - RNA, 23 nt, Artificial
  synthetic
ugaaucacucuuguuacuucugu

SEQ ID NO: 2289 - RNA, 23 nt, Artificial
  synthetic
ugaaucacucuuguuacuucugu

SEQ ID NO: 2290 - RNA, 23 nt, Artificial
  synthetic
uaaagcgguaauagcagcaagaa

SEQ ID NO: 2291 - RNA, 23 nt, Artificial
  synthetic
uuuuaaagcgguaauagcagcaa

SEQ ID NO: 2292 - RNA, 23 nt, Artificial
  synthetic
uugucaaguuuaguaaaagggcg

SEQ ID NO: 2293 - RNA, 23 nt, Artificial
  synthetic
uucugucaaguuuaguaaaaggg

SEQ ID NO: 2294 - RNA, 23 nt, Artificial
  synthetic
uuucugucaaguuuaguaaaagg

SEQ ID NO: 2295 - RNA, 23 nt, Artificial
  synthetic
uaacuucugucaaguuuaguaaa

SEQ ID NO: 2296 - RNA, 23 nt, Artificial
  synthetic
uugaacuucugucaaguuuagua

SEQ ID NO: 2297 - RNA, 23 nt, Artificial
  synthetic
uuuacugaacuucugucaaguuu

SEQ ID NO: 2298 - RNA, 23 nt, Artificial
  synthetic
uaauuuacugaacuucugucaag

SEQ ID NO: 2299 - RNA, 23 nt, Artificial
  synthetic
uagaauuuacugaacuucuguca

SEQ ID NO: 2300 - RNA, 23 nt, Artificial
  synthetic
uaagaauuuacugaacuucuguc

SEQ ID NO: 2301 - RNA, 23 nt, Artificial
  synthetic
uuaagaauuuacugaacuucugu

SEQ ID NO: 2302 - RNA, 23 nt, Artificial
  synthetic
uauaauaauccgucaguuuggcg

SEQ ID NO: 2303 - RNA, 23 nt, Artificial
  synthetic
uaguaaaaguuuucccuuaacuu

SEQ ID NO: 2304 - RNA, 23 nt, Artificial
  synthetic
uaaguaaaaguuuucccuuaacu

SEQ ID NO: 2305 - RNA, 23 nt, Artificial
  synthetic
uaaaguaaaaguuuucccuuaac

SEQ ID NO: 2306 - RNA, 23 nt, Artificial
  synthetic
uacaaaguaaaaguuuucccuua

SEQ ID NO: 2307 - RNA, 23 nt, Artificial
  synthetic
uuacaaaguaaaaguuuucccuu

SEQ ID NO: 2308 - RNA, 23 nt, Artificial
  synthetic
uucuacaaaguaaaaguuuuccc

SEQ ID NO: 2309 - RNA, 23 nt, Artificial
  synthetic
uaucuacaaaguaaaaguuuucc

SEQ ID NO: 2310 - RNA, 23 nt, Artificial
  synthetic
uaucuacaaaguaaaaguuuucc

SEQ ID NO: 2311 - RNA, 21 nt, Artificial
  synthetic
uccgacuuccgguaaagaguc

SEQ ID NO: 2312 - RNA, 21 nt, Artificial
  synthetic
ccgacuuccgguaaagagucc

SEQ ID NO: 2313 - RNA, 21 nt, Artificial
  synthetic
cgacuuccgguaaagaguccc

SEQ ID NO: 2314 - RNA, 21 nt, Artificial
  synthetic
aaugugaaguacaagugaaaa

SEQ ID NO: 2315 - RNA, 21 nt, Artificial
  synthetic
augugaaguacaagugaaaaa

SEQ ID NO: 2316 - RNA, 21 nt, Artificial
  synthetic
gugaaguacaagugaaaaaug

SEQ ID NO: 2317 - RNA, 21 nt, Artificial
  synthetic
caugagaaaaguacagaaucc

SEQ ID NO: 2318 - RNA, 21 nt, Artificial
  synthetic
cacuucucacacuucagauuu

SEQ ID NO: 2319 - RNA, 21 nt, Artificial
  synthetic
acuucucacacuucagauuuc

SEQ ID NO: 2320 - RNA, 21 nt, Artificial
  synthetic
cuucucacacuucagauuuca

SEQ ID NO: 2321 - RNA, 21 nt, Artificial
  synthetic
uucucacacuucagauuucaa

SEQ ID NO: 2322 - RNA, 21 nt, Artificial
  synthetic
ucucacacuucagauuucaac

SEQ ID NO: 2323 - RNA, 21 nt, Artificial
  synthetic
cucacacuucagauuucaacc

SEQ ID NO: 2324 - RNA, 21 nt, Artificial
  synthetic
ucacacuucagauuucaaccc

SEQ ID NO: 2325 - RNA, 21 nt, Artificial
  synthetic
cacacuucagauuucaacccg

SEQ ID NO: 2326 - RNA, 21 nt, Artificial
  synthetic
acuucagauuucaacccgaau

SEQ ID NO: 2327 - RNA, 21 nt, Artificial
  synthetic
ucagaccaaagaguaguuaau

SEQ ID NO: 2328 - RNA, 21 nt, Artificial
  synthetic
cagaccaaagaguaguuaaug

SEQ ID NO: 2329 - RNA, 21 nt, Artificial
  synthetic
cucuacuaugccuaaacgcau

SEQ ID NO: 2330 - RNA, 21 nt, Artificial
  synthetic
ucuacuaugccuaaacgcaug

SEQ ID NO: 2331 - RNA, 21 nt, Artificial
  synthetic
uacuaugccuaaacgcauguc

SEQ ID NO: 2332 - RNA, 21 nt, Artificial
  synthetic
cuucugaaucuauggaucaac

SEQ ID NO: 2333 - RNA, 21 nt, Artificial
  synthetic
uucugaaucuauggaucaacu

SEQ ID NO: 2334 - RNA, 21 nt, Artificial
  synthetic
ucugaaucuauggaucaacua

SEQ ID NO: 2335 - RNA, 21 nt, Artificial
  synthetic
cugaaucuauggaucaacuac

SEQ ID NO: 2336 - RNA, 21 nt, Artificial
  synthetic
ugaaucuauggaucaacuacu

SEQ ID NO: 2337 - RNA, 21 nt, Artificial
  synthetic
gaaucuauggaucaacuacua

SEQ ID NO: 2338 - RNA, 21 nt, Artificial
  synthetic
aaucuauggaucaacuacuaa

SEQ ID NO: 2339 - RNA, 21 nt, Artificial
  synthetic
aucuauggaucaacuacuaaa

SEQ ID NO: 2340 - RNA, 21 nt, Artificial
  synthetic
uauacccaauaccuaugacgc

SEQ ID NO: 2341 - RNA, 21 nt, Artificial
  synthetic
gacauauagagcaguaccaaa

SEQ ID NO: 2342 - RNA, 21 nt, Artificial
  synthetic
auauagagcaguaccaaauau

SEQ ID NO: 2343 - RNA, 21 nt, Artificial
  synthetic
uauagagcaguaccaaauaug

SEQ ID NO: 2344 - RNA, 21 nt, Artificial
  synthetic
auagagcaguaccaaauaugc

SEQ ID NO: 2345 - RNA, 21 nt, Artificial
  synthetic
agagcaguaccaaauaugccc

SEQ ID NO: 2346 - RNA, 21 nt, Artificial
  synthetic
ugucccaaauuaccauacaac

SEQ ID NO: 2347 - RNA, 21 nt, Artificial
  synthetic
ucccaaauuaccauacaacaa

SEQ ID NO: 2348 - RNA, 21 nt, Artificial
  synthetic
aagcccuucuuucuacuuugc

SEQ ID NO: 2349 - RNA, 21 nt, Artificial
  synthetic
cccuucuuucuacuuugccau

SEQ ID NO: 2350 - RNA, 21 nt, Artificial
  synthetic
ccuucuuucuacuuugccauu

SEQ ID NO: 2351 - RNA, 21 nt, Artificial
  synthetic
cuucuuucuacuuugccauuu

SEQ ID NO: 2352 - RNA, 21 nt, Artificial
  synthetic
uucuuucuacuuugccauuuc

SEQ ID NO: 2353 - RNA, 21 nt, Artificial
  synthetic
ucuuucuacuuugccauuucc

SEQ ID NO: 2354 - RNA, 21 nt, Artificial
  synthetic
cuuucuacuuugccauuucca

SEQ ID NO: 2355 - RNA, 21 nt, Artificial
  synthetic
uuucuacuuugccauuuccac

SEQ ID NO: 2356 - RNA, 21 nt, Artificial
  synthetic
uucuacuuugccauuuccacg

SEQ ID NO: 2357 - RNA, 21 nt, Artificial
  synthetic
cauguacagucaggaaugguu

SEQ ID NO: 2358 - RNA, 21 nt, Artificial
  synthetic
auguacagucaggaaugguuc

SEQ ID NO: 2359 - RNA, 21 nt, Artificial
  synthetic
uguacagucaggaaugguucc

SEQ ID NO: 2360 - RNA, 21 nt, Artificial
  synthetic
caggaaugguuccuucucauc

SEQ ID NO: 2361 - RNA, 21 nt, Artificial
  synthetic
gaaugguuccuucucauccaa

SEQ ID NO: 2362 - RNA, 21 nt, Artificial
  synthetic
augguuccuucucauccaacu

SEQ ID NO: 2363 - RNA, 21 nt, Artificial
  synthetic
ugguuccuucucauccaacug

SEQ ID NO: 2364 - RNA, 21 nt, Artificial
  synthetic
guuccuucucauccaacugcc

SEQ ID NO: 2365 - RNA, 21 nt, Artificial
  synthetic
caugcgccaaugaugcuaaug

SEQ ID NO: 2366 - RNA, 21 nt, Artificial
  synthetic
gcgccaaugaugcuaaugacg

SEQ ID NO: 2367 - RNA, 21 nt, Artificial
  synthetic
gccaaugaugcuaaugacgac

SEQ ID NO: 2368 - RNA, 21 nt, Artificial
  synthetic
ccaaugaugcuaaugacgaca

SEQ ID NO: 2369 - RNA, 21 nt, Artificial
  synthetic
augaugcuaaugacgacacag

SEQ ID NO: 2370 - RNA, 21 nt, Artificial
  synthetic
ugaugcuaaugacgacacagc

SEQ ID NO: 2371 - RNA, 21 nt, Artificial
  synthetic
cgcucaaagugcacuacagcc

SEQ ID NO: 2372 - RNA, 21 nt, Artificial
  synthetic
agcccauuccagucucgacaa

SEQ ID NO: 2373 - RNA, 21 nt, Artificial
  synthetic
cccauuccagucucgacaaca

SEQ ID NO: 2374 - RNA, 21 nt, Artificial
  synthetic
caccaccaacagcaguuguaa

SEQ ID NO: 2375 - RNA, 21 nt, Artificial
  synthetic
accaccaacagcaguuguaag

SEQ ID NO: 2376 - RNA, 21 nt, Artificial
  synthetic
ccaccaacagcaguuguaagg

SEQ ID NO: 2377 - RNA, 21 nt, Artificial
  synthetic
accaacagcaguuguaaggcu

SEQ ID NO: 2378 - RNA, 21 nt, Artificial
  synthetic
caacagcaguuguaaggcugc

SEQ ID NO: 2379 - RNA, 21 nt, Artificial
  synthetic
cuucuacugcuucuaccaacu

SEQ ID NO: 2380 - RNA, 21 nt, Artificial
  synthetic
ucuacugcuucuaccaacugg

SEQ ID NO: 2381 - RNA, 21 nt, Artificial
  synthetic
cuacugcuucuaccaacugga

SEQ ID NO: 2382 - RNA, 21 nt, Artificial
  synthetic
cugcuucuaccaacuggaagc

SEQ ID NO: 2383 - RNA, 21 nt, Artificial
  synthetic
caacuggaagcacagaaaacu

SEQ ID NO: 2384 - RNA, 21 nt, Artificial
  synthetic
uugauuucuuguaacauccaa

SEQ ID NO: 2385 - RNA, 21 nt, Artificial
  synthetic
auuucuuguaacauccaauag

SEQ ID NO: 2386 - RNA, 21 nt, Artificial
  synthetic
uucuuguaacauccaauagga

SEQ ID NO: 2387 - RNA, 21 nt, Artificial
  synthetic
ucuuguaacauccaauaggaa

SEQ ID NO: 2388 - RNA, 21 nt, Artificial
  synthetic
uguaacauccaauaggaaugc

SEQ ID NO: 2389 - RNA, 21 nt, Artificial
  synthetic
uaacauccaauaggaaugcua

SEQ ID NO: 2390 - RNA, 21 nt, Artificial
  synthetic
aacauccaauaggaaugcuaa

SEQ ID NO: 2391 - RNA, 21 nt, Artificial
  synthetic
acauccaauaggaaugcuaac

SEQ ID NO: 2392 - RNA, 21 nt, Artificial
  synthetic
cauccaauaggaaugcuaaca

SEQ ID NO: 2393 - RNA, 21 nt, Artificial
  synthetic
aauaggaaugcuaacaguuca

SEQ ID NO: 2394 - RNA, 21 nt, Artificial
  synthetic
auaggaaugcuaacaguucac

SEQ ID NO: 2395 - RNA, 21 nt, Artificial
  synthetic
uaggaaugcuaacaguucacu

SEQ ID NO: 2396 - RNA, 21 nt, Artificial
  synthetic
aggaaugcuaacaguucacuu

SEQ ID NO: 2397 - RNA, 21 nt, Artificial
  synthetic
ggaaugcuaacaguucacuug

SEQ ID NO: 2398 - RNA, 21 nt, Artificial
  synthetic
gaaugcuaacaguucacuugc

SEQ ID NO: 2399 - RNA, 21 nt, Artificial
  synthetic
gcuaacaguucacuugcagug

SEQ ID NO: 2400 - RNA, 21 nt, Artificial
  synthetic
caguucacuugcaguggaaga

SEQ ID NO: 2401 - RNA, 21 nt, Artificial
  synthetic
gaccgaguagaggcauuuagg

SEQ ID NO: 2402 - RNA, 21 nt, Artificial
  synthetic
accgaguagaggcauuuagga

SEQ ID NO: 2403 - RNA, 21 nt, Artificial
  synthetic
ggcuauuccauaauuccauau

SEQ ID NO: 2404 - RNA, 21 nt, Artificial
  synthetic
ugccgaaacuggaaguuauuu

SEQ ID NO: 2405 - RNA, 21 nt, Artificial
  synthetic
ccgaaacuggaaguuauuuau

SEQ ID NO: 2406 - RNA, 21 nt, Artificial
  synthetic
cgaaacuggaaguuauuuauu

SEQ ID NO: 2407 - RNA, 21 nt, Artificial
  synthetic
gaaacuggaaguuauuuauuu

SEQ ID NO: 2408 - RNA, 21 nt, Artificial
  synthetic
aaacuggaaguuauuuauuuu

SEQ ID NO: 2409 - RNA, 21 nt, Artificial
  synthetic
uaauaacccuugaaagucaug

SEQ ID NO: 2410 - RNA, 21 nt, Artificial
  synthetic
aauaacccuugaaagucauga

SEQ ID NO: 2411 - RNA, 21 nt, Artificial
  synthetic
aacccuugaaagucaugaaca

SEQ ID NO: 2412 - RNA, 21 nt, Artificial
  synthetic
cuugaaagucaugaacacauc

SEQ ID NO: 2413 - RNA, 21 nt, Artificial
  synthetic
agucaugaacacaucagcuag

SEQ ID NO: 2414 - RNA, 21 nt, Artificial
  synthetic
gucaugaacacaucagcuagc

SEQ ID NO: 2415 - RNA, 21 nt, Artificial
  synthetic
ucaugaacacaucagcuagca

SEQ ID NO: 2416 - RNA, 21 nt, Artificial
  synthetic
caugaacacaucagcuagcaa

SEQ ID NO: 2417 - RNA, 21 nt, Artificial
  synthetic
caugaacacaucagcuagcaa

SEQ ID NO: 2418 - RNA, 21 nt, Artificial
  synthetic
augaacacaucagcuagcaaa

SEQ ID NO: 2419 - RNA, 21 nt, Artificial
  synthetic
ugaacacaucagcuagcaaaa

SEQ ID NO: 2420 - RNA, 21 nt, Artificial
  synthetic
gaacacaucagcuagcaaaag

SEQ ID NO: 2421 - RNA, 21 nt, Artificial
  synthetic
aacacaucagcuagcaaaaga

SEQ ID NO: 2422 - RNA, 21 nt, Artificial
  synthetic
caucagcuagcaaaagaagua

SEQ ID NO: 2423 - RNA, 21 nt, Artificial
  synthetic
cuagcaaaagaaguaacaaga

SEQ ID NO: 2424 - RNA, 21 nt, Artificial
  synthetic
guaacaagagugauucuugcu

SEQ ID NO: 2425 - RNA, 21 nt, Artificial
  synthetic
uaacaagagugauucuugcug

SEQ ID NO: 2426 - RNA, 21 nt, Artificial
  synthetic
aacaagagugauucuugcugc

SEQ ID NO: 2427 - RNA, 21 nt, Artificial
  synthetic
agagugauucuugcugcuauu

SEQ ID NO: 2428 - RNA, 21 nt, Artificial
  synthetic
gagugauucuugcugcuauua

SEQ ID NO: 2429 - RNA, 21 nt, Artificial
  synthetic
gugauucuugcugcuauuacu

SEQ ID NO: 2430 - RNA, 21 nt, Artificial
  synthetic
uuggaacgcccuuuuacuaaa

SEQ ID NO: 2431 - RNA, 21 nt, Artificial
  synthetic
uggaacgcccuuuuacuaaac

SEQ ID NO: 2432 - RNA, 21 nt, Artificial
  synthetic
gaacgcccuuuuacuaaacuu

SEQ ID NO: 2433 - RNA, 21 nt, Artificial
  synthetic
aacgcccuuuuacuaaacuug

SEQ ID NO: 2434 - RNA, 21 nt, Artificial
  synthetic
acgcccuuuuacuaaacuuga

SEQ ID NO: 2435 - RNA, 21 nt, Artificial
  synthetic
cgcccuuuuacuaaacuugac

SEQ ID NO: 2436 - RNA, 21 nt, Artificial
  synthetic
guuucaguaaauucuuaccgu

SEQ ID NO: 2437 - RNA, 21 nt, Artificial
  synthetic
uuucaguaaauucuuaccguc

SEQ ID NO: 2438 - RNA, 21 nt, Artificial
  synthetic
uucaguaaauucuuaccguca

SEQ ID NO: 2439 - RNA, 21 nt, Artificial
  synthetic
ucaguaaauucuuaccgucaa

SEQ ID NO: 2440 - RNA, 21 nt, Artificial
  synthetic
caguaaauucuuaccgucaaa

SEQ ID NO: 2441 - RNA, 21 nt, Artificial
  synthetic
aguaaauucuuaccgucaaac

SEQ ID NO: 2442 - RNA, 21 nt, Artificial
  synthetic
guaaauucuuaccgucaaacu

SEQ ID NO: 2443 - RNA, 21 nt, Artificial
  synthetic
uaaauucuuaccgucaaacug

SEQ ID NO: 2444 - RNA, 21 nt, Artificial
  synthetic
aaauucuuaccgucaaacuga

SEQ ID NO: 2445 - RNA, 21 nt, Artificial
  synthetic
aauucuuaccgucaaacugac

SEQ ID NO: 2446 - RNA, 21 nt, Artificial
  synthetic
auucuuaccgucaaacugacg

SEQ ID NO: 2447 - RNA, 21 nt, Artificial
  synthetic
uucuuaccgucaaacugacgg

SEQ ID NO: 2448 - RNA, 21 nt, Artificial
  synthetic
ucuuaccgucaaacugacgga

SEQ ID NO: 2449 - RNA, 21 nt, Artificial
  synthetic
cuuaccgucaaacugacggau

SEQ ID NO: 2450 - RNA, 21 nt, Artificial
  synthetic
uuaccgucaaacugacggauu

SEQ ID NO: 2451 - RNA, 21 nt, Artificial
  synthetic
uaccgucaaacugacggauua

SEQ ID NO: 2452 - RNA, 21 nt, Artificial
  synthetic
uaccgucaaacugacggauua

SEQ ID NO: 2453 - RNA, 21 nt, Artificial
  synthetic
accgucaaacugacggauuau

SEQ ID NO: 2454 - RNA, 21 nt, Artificial
  synthetic
aacugacggauuauuauuuau

SEQ ID NO: 2455 - RNA, 21 nt, Artificial
  synthetic
aguuugaugaggugaucacug

SEQ ID NO: 2456 - RNA, 21 nt, Artificial
  synthetic
acugucuacagugguucaacu

SEQ ID NO: 2457 - RNA, 21 nt, Artificial
  synthetic
cugucuacagugguucaacuu

SEQ ID NO: 2458 - RNA, 21 nt, Artificial
  synthetic
cuacagugguucaacuuuuaa

SEQ ID NO: 2459 - RNA, 21 nt, Artificial
  synthetic
uacagugguucaacuuuuaag

SEQ ID NO: 2460 - RNA, 21 nt, Artificial
  synthetic
ucaacuuuuaaguuaagggaa

SEQ ID NO: 2461 - RNA, 21 nt, Artificial
  synthetic
aacuuuuaaguuaagggaaaa

SEQ ID NO: 2462 - RNA, 21 nt, Artificial
  synthetic
aaaaacuuuuacuuuguagau

SEQ ID NO: 2463 - RNA, 21 nt, Artificial
  synthetic
cucagucuacgauuucuuuug

SEQ ID NO: 2464 - RNA, 21 nt, Artificial
  synthetic
ucagucuacgauuucuuuuga

SEQ ID NO: 2465 - RNA, 21 nt, Artificial
  synthetic
cagucuacgauuucuuuugau

SEQ ID NO: 2466 - RNA, 21 nt, Artificial
  synthetic
caugagaaaaguacagaaucc

SEQ ID NO: 2467 - RNA, 21 nt, Artificial
  synthetic
caugagaaaaguacagaaucc

SEQ ID NO: 2468 - RNA, 21 nt, Artificial
  synthetic
aaauguucagacuuuguugug

SEQ ID NO: 2469 - RNA, 21 nt, Artificial
  synthetic
ugcuaucagugcuaaagugaa

SEQ ID NO: 2470 - RNA, 21 nt, Artificial
  synthetic
cguaugauagcaguuuaucuu

SEQ ID NO: 2471 - RNA, 21 nt, Artificial
  synthetic
guaugauagcaguuuaucuuc

SEQ ID NO: 2472 - RNA, 21 nt, Artificial
  synthetic
gauaacucagaagaauuuuua

SEQ ID NO: 2473 - RNA, 21 nt, Artificial
  synthetic
auccacuucucacacuucaga

SEQ ID NO: 2474 - RNA, 21 nt, Artificial
  synthetic
ucucacacuucagauuucaac

SEQ ID NO: 2475 - RNA, 21 nt, Artificial
  synthetic
cucuacuaugccuaaacgcau

SEQ ID NO: 2476 - RNA, 21 nt, Artificial
  synthetic
ucuacuaugccuaaacgcaug

SEQ ID NO: 2477 - RNA, 21 nt, Artificial
  synthetic
ucgaaaucacagaguuucugc

SEQ ID NO: 2478 - RNA, 21 nt, Artificial
  synthetic
cgaaaucacagaguuucugcu

SEQ ID NO: 2479 - RNA, 21 nt, Artificial
  synthetic
guucuacuucugaaucuaugg

SEQ ID NO: 2480 - RNA, 21 nt, Artificial
  synthetic
uucuacuucugaaucuaugga

SEQ ID NO: 2481 - RNA, 21 nt, Artificial
  synthetic
ucuacuucugaaucuauggau

SEQ ID NO: 2482 - RNA, 21 nt, Artificial
  synthetic
cuacuucugaaucuauggauc

SEQ ID NO: 2483 - RNA, 21 nt, Artificial
  synthetic
ugaaucuauggaucaacuacu

SEQ ID NO: 2484 - RNA, 21 nt, Artificial
  synthetic
ugaaucuauggaucaacuacu

SEQ ID NO: 2485 - RNA, 21 nt, Artificial
  synthetic
acuacuaaacaaaaauagaga

SEQ ID NO: 2486 - RNA, 21 nt, Artificial
  synthetic
accaagugcuaaggauucuuu

SEQ ID NO: 2487 - RNA, 21 nt, Artificial
  synthetic
uuaggaaaucaacauugaauc

SEQ ID NO: 2488 - RNA, 21 nt, Artificial
  synthetic
agccaacuccaguuuauacuc

SEQ ID NO: 2489 - RNA, 21 nt, Artificial
  synthetic
uucuucagcaacucaguacgg

SEQ ID NO: 2490 - RNA, 21 nt, Artificial
  synthetic
uuucuacuuugccauuuccac

SEQ ID NO: 2491 - RNA, 21 nt, Artificial
  synthetic
uucuacuuugccauuuccacg

SEQ ID NO: 2492 - RNA, 21 nt, Artificial
  synthetic
ucuuguaacauccaauaggaa

SEQ ID NO: 2493 - RNA, 21 nt, Artificial
  synthetic
ccgaaacuggaaguuauuuau

SEQ ID NO: 2494 - RNA, 21 nt, Artificial
  synthetic
ccgaaacuggaaguuauuuau

SEQ ID NO: 2495 - RNA, 21 nt, Artificial
  synthetic
ccgaaacuggaaguuauuuau

SEQ ID NO: 2496 - RNA, 21 nt, Artificial
  synthetic
aaacuggaaguuauuuauuuu

SEQ ID NO: 2497 - RNA, 21 nt, Artificial
  synthetic
cuugaaagucaugaacacauc

SEQ ID NO: 2498 - RNA, 21 nt, Artificial
  synthetic
cuugaaagucaugaacacauc

SEQ ID NO: 2499 - RNA, 21 nt, Artificial
  synthetic
agucaugaacacaucagcuag

SEQ ID NO: 2500 - RNA, 21 nt, Artificial
  synthetic
agucaugaacacaucagcuag

SEQ ID NO: 2501 - RNA, 21 nt, Artificial
  synthetic
agucaugaacacaucagcuag

SEQ ID NO: 2502 - RNA, 21 nt, Artificial
  synthetic
gucaugaacacaucagcuagc

SEQ ID NO: 2503 - RNA, 21 nt, Artificial
  synthetic
gucaugaacacaucagcuagc

SEQ ID NO: 2504 - RNA, 21 nt, Artificial
  synthetic
caugaacacaucagcuagcaa

SEQ ID NO: 2505 - RNA, 21 nt, Artificial
  synthetic
agagugauucuugcugcuauu

SEQ ID NO: 2506 - RNA, 21 nt, Artificial
  synthetic
agagugauucuugcugcuauu

SEQ ID NO: 2507 - RNA, 21 nt, Artificial
  synthetic
gugauucuugcugcuauuacu

SEQ ID NO: 2508 - RNA, 21 nt, Artificial
  synthetic
gugauucuugcugcuauuacu

SEQ ID NO: 2509 - RNA, 21 nt, Artificial
  synthetic
cgcccuuuuacuaaacuugac

SEQ ID NO: 2510 - RNA, 21 nt, Artificial
  synthetic
cgcccuuuuacuaaacuugac

SEQ ID NO: 2511 - RNA, 21 nt, Artificial
  synthetic
uaccgucaaacugacggauua

SEQ ID NO: 2512 - RNA, 21 nt, Artificial
  synthetic
acugucuacagugguucaacu

SEQ ID NO: 2513 - RNA, 21 nt, Artificial
  synthetic
acugucuacagugguucaacu

SEQ ID NO: 2514 - RNA, 21 nt, Artificial
  synthetic
agugguucaacuuuuaaguua

SEQ ID NO: 2515 - RNA, 21 nt, Artificial
  synthetic
gugguucaacuuuuaaguuaa

SEQ ID NO: 2516 - RNA, 21 nt, Artificial
  synthetic
uaagggaaaaacuuuuacuuu

SEQ ID NO: 2517 - RNA, 21 nt, Artificial
  synthetic
ccucagccuacgauuucuuuu

SEQ ID NO: 2518 - RNA, 21 nt, Artificial
  synthetic
cucagccuacgauuucuuuug

SEQ ID NO: 2519 - RNA, 21 nt, Artificial
  synthetic
ucagccuacgauuucuuuuga

SEQ ID NO: 2520 - RNA, 21 nt, Artificial
  synthetic
gaggaugguucauauacuuac

SEQ ID NO: 2521 - RNA, 21 nt, Artificial
  synthetic
gaggaugguucauauacuuau

SEQ ID NO: 2522 - RNA, 21 nt, Artificial
  synthetic
aggaugguucauauacuuacg

SEQ ID NO: 2523 - RNA, 21 nt, Artificial
  synthetic
aaugugaaguacaagugaaaa

SEQ ID NO: 2524 - RNA, 21 nt, Artificial
  synthetic
aaugugaaguacaagugaaaa

SEQ ID NO: 2525 - RNA, 21 nt, Artificial
  synthetic
gugaaguacaagugaaaaacg

SEQ ID NO: 2526 - RNA, 21 nt, Artificial
  synthetic
aaggaguuuuuaaaacauaca

SEQ ID NO: 2527 - RNA, 21 nt, Artificial
  synthetic
aggaguuuuuaaaacauacag

SEQ ID NO: 2528 - RNA, 21 nt, Artificial
  synthetic
aaacauacaguccuaagugug

SEQ ID NO: 2529 - RNA, 21 nt, Artificial
  synthetic
aacauacaguccuaaguguga

SEQ ID NO: 2530 - RNA, 21 nt, Artificial
  synthetic
acauacaguccuaagugugac

SEQ ID NO: 2531 - RNA, 21 nt, Artificial
  synthetic
gcugcacaugagaaaaguaca

SEQ ID NO: 2532 - RNA, 21 nt, Artificial
  synthetic
cugcacaugagaaaaguacag

SEQ ID NO: 2533 - RNA, 21 nt, Artificial
  synthetic
auggagaguguuuuguucaaa

SEQ ID NO: 2534 - RNA, 21 nt, Artificial
  synthetic
ggagaguguuuuguucaaaug

SEQ ID NO: 2535 - RNA, 21 nt, Artificial
  synthetic
uuuguucaaaugcucagacuu

SEQ ID NO: 2536 - RNA, 21 nt, Artificial
  synthetic
uguucaaaugcucagacuucg

SEQ ID NO: 2537 - RNA, 21 nt, Artificial
  synthetic
guucaaaugcucagacuucgu

SEQ ID NO: 2538 - RNA, 21 nt, Artificial
  synthetic
uucaaaugcucagacuucguu

SEQ ID NO: 2539 - RNA, 21 nt, Artificial
  synthetic
ucaaaugcucagacuucguug

SEQ ID NO: 2540 - RNA, 21 nt, Artificial
  synthetic
caaaugcucagacuucguugu

SEQ ID NO: 2541 - RNA, 21 nt, Artificial
  synthetic
aaaugcucagacuucguugug

SEQ ID NO: 2542 - RNA, 21 nt, Artificial
  synthetic
aaugcucagacuucguugugg

SEQ ID NO: 2543 - RNA, 21 nt, Artificial
  synthetic
acauguuucgauauaaugaag

SEQ ID NO: 2544 - RNA, 21 nt, Artificial
  synthetic
uuuaucuucauauacgguucc

SEQ ID NO: 2545 - RNA, 21 nt, Artificial
  synthetic
agggacaacucagaagaauuu

SEQ ID NO: 2546 - RNA, 21 nt, Artificial
  synthetic
gggacaacucagaagaauuuc

SEQ ID NO: 2547 - RNA, 21 nt, Artificial
  synthetic
ggacaacucagaagaauuucu

SEQ ID NO: 2548 - RNA, 21 nt, Artificial
  synthetic
gacaacucagaagaauuucuu

SEQ ID NO: 2549 - RNA, 21 nt, Artificial
  synthetic
ugcuucucacacuucagauuu

SEQ ID NO: 2550 - RNA, 21 nt, Artificial
  synthetic
gcuucucacacuucagauuuc

SEQ ID NO: 2551 - RNA, 21 nt, Artificial
  synthetic
cuucucacacuucagauuuca

SEQ ID NO: 2552 - RNA, 21 nt, Artificial
  synthetic
cuucucacacuucagauuuca

SEQ ID NO: 2553 - RNA, 21 nt, Artificial
  synthetic
uucucacacuucagauuucaa

SEQ ID NO: 2554 - RNA, 21 nt, Artificial
  synthetic
uucucacacuucagauuucaa

SEQ ID NO: 2555 - RNA, 21 nt, Artificial
  synthetic
ucagaccaaagaguaguuaau

SEQ ID NO: 2556 - RNA, 21 nt, Artificial
  synthetic
ucagaccaaagaguaguuaau

SEQ ID NO: 2557 - RNA, 21 nt, Artificial
  synthetic
cagaccaaagaguaguuaaug

SEQ ID NO: 2558 - RNA, 21 nt, Artificial
  synthetic
cagaccaaagaguaguuaauu

SEQ ID NO: 2559 - RNA, 21 nt, Artificial
  synthetic
uagaauuuguaucccacaauc

SEQ ID NO: 2560 - RNA, 21 nt, Artificial
  synthetic
agaauuuguaucccacaaucc

SEQ ID NO: 2561 - RNA, 21 nt, Artificial
  synthetic
gaauuuguaucccacaauccc

SEQ ID NO: 2562 - RNA, 21 nt, Artificial
  synthetic
gugaaacaucaccuagcuuuu

SEQ ID NO: 2563 - RNA, 21 nt, Artificial
  synthetic
ugaaacaucaccuagcuuuuc

SEQ ID NO: 2564 - RNA, 21 nt, Artificial
  synthetic
gaaacaucaccuagcuuuuca

SEQ ID NO: 2565 - RNA, 21 nt, Artificial
  synthetic
aaacaucaccuagcuuuucaa

SEQ ID NO: 2566 - RNA, 21 nt, Artificial
  synthetic
aacaucaccuagcuuuucaaa

SEQ ID NO: 2567 - RNA, 21 nt, Artificial
  synthetic
acaucaccuagcuuuucaaaa

SEQ ID NO: 2568 - RNA, 21 nt, Artificial
  synthetic
caucaccuagcuuuucaaaag

SEQ ID NO: 2569 - RNA, 21 nt, Artificial
  synthetic
aucaccuagcuuuucaaaagc

SEQ ID NO: 2570 - RNA, 21 nt, Artificial
  synthetic
ucaccuagcuuuucaaaagcu

SEQ ID NO: 2571 - RNA, 21 nt, Artificial
  synthetic
caccuagcuuuucaaaagcug

SEQ ID NO: 2572 - RNA, 21 nt, Artificial
  synthetic
accuagcuuuucaaaagcuga

SEQ ID NO: 2573 - RNA, 21 nt, Artificial
  synthetic
ccuagcuuuucaaaagcugac

SEQ ID NO: 2574 - RNA, 21 nt, Artificial
  synthetic
caucugaaucuauggaucaac

SEQ ID NO: 2575 - RNA, 21 nt, Artificial
  synthetic
aucugaaucuauggaucaacu

SEQ ID NO: 2576 - RNA, 21 nt, Artificial
  synthetic
ucugaaucuauggaucaacua

SEQ ID NO: 2577 - RNA, 21 nt, Artificial
  synthetic
ucugaaucuauggaucaacua

SEQ ID NO: 2578 - RNA, 21 nt, Artificial
  synthetic
cugaaucuauggaucaacuac

SEQ ID NO: 2579 - RNA, 21 nt, Artificial
  synthetic
cugaaucuauggaucaacuau

SEQ ID NO: 2580 - RNA, 21 nt, Artificial
  synthetic
aucuauggaucaacuacuaag

SEQ ID NO: 2581 - RNA, 21 nt, Artificial
  synthetic
ucuauggaucaacuacuaagc

SEQ ID NO: 2582 - RNA, 21 nt, Artificial
  synthetic
cuauggaucaacuacuaagca

SEQ ID NO: 2583 - RNA, 21 nt, Artificial
  synthetic
uauggaucaacuacuaagcaa

SEQ ID NO: 2584 - RNA, 21 nt, Artificial
  synthetic
auggaucaacuacuaagcaaa

SEQ ID NO: 2585 - RNA, 21 nt, Artificial
  synthetic
uggaucaacuacuaagcaaaa

SEQ ID NO: 2586 - RNA, 21 nt, Artificial
  synthetic
ggaucaacuacuaagcaaaaa

SEQ ID NO: 2587 - RNA, 21 nt, Artificial
  synthetic
gaucaacuacuaagcaaaaau

SEQ ID NO: 2588 - RNA, 21 nt, Artificial
  synthetic
aaggagaaaagucacgagauu

SEQ ID NO: 2589 - RNA, 21 nt, Artificial
  synthetic
ggaguucaacccucguucuuu

SEQ ID NO: 2590 - RNA, 21 nt, Artificial
  synthetic
guucaacccucguucuuucuc

SEQ ID NO: 2591 - RNA, 21 nt, Artificial
  synthetic
uucaacccucguucuuucucu

SEQ ID NO: 2592 - RNA, 21 nt, Artificial
  synthetic
ucaacccucguucuuucucuc

SEQ ID NO: 2593 - RNA, 21 nt, Artificial
  synthetic
caacccucguucuuucucuca

SEQ ID NO: 2594 - RNA, 21 nt, Artificial
  synthetic
aacccucguucuuucucucag

SEQ ID NO: 2595 - RNA, 21 nt, Artificial
  synthetic
cguucuuucucucagccaaag

SEQ ID NO: 2596 - RNA, 21 nt, Artificial
  synthetic
guucuuucucucagccaaagc

SEQ ID NO: 2597 - RNA, 21 nt, Artificial
  synthetic
aguccugucauacaagguaau

SEQ ID NO: 2598 - RNA, 21 nt, Artificial
  synthetic
guccugucauacaagguaaug

SEQ ID NO: 2599 - RNA, 21 nt, Artificial
  synthetic
ugucauacaagguaaugccag

SEQ ID NO: 2600 - RNA, 21 nt, Artificial
  synthetic
gucauacaagguaaugccagg

SEQ ID NO: 2601 - RNA, 21 nt, Artificial
  synthetic
ucuacuuugccauuuccaccg

SEQ ID NO: 2602 - RNA, 21 nt, Artificial
  synthetic
aagcacagaaaacuagaacuu

SEQ ID NO: 2603 - RNA, 21 nt, Artificial
  synthetic
gcacagaaaacuagaacuuca

SEQ ID NO: 2604 - RNA, 21 nt, Artificial
  synthetic
acagaaaacuagaacuucauu

SEQ ID NO: 2605 - RNA, 21 nt, Artificial
  synthetic
cagaaaacuagaacuucauug

SEQ ID NO: 2606 - RNA, 21 nt, Artificial
  synthetic
ugcuugcugaaacuggaaguu

SEQ ID NO: 2607 - RNA, 21 nt, Artificial
  synthetic
cugaaacuggaaguuauuuau

SEQ ID NO: 2608 - RNA, 21 nt, Artificial
  synthetic
ugaaacuggaaguuauuuauu

SEQ ID NO: 2609 - RNA, 21 nt, Artificial
  synthetic
gaaacuggaaguuauuuauuu

SEQ ID NO: 2610 - RNA, 21 nt, Artificial
  synthetic
gaaacuggaaguuauuuauuu

SEQ ID NO: 2611 - RNA, 21 nt, Artificial
  synthetic
uugagagucaugaacacauca

SEQ ID NO: 2612 - RNA, 21 nt, Artificial
  synthetic
agucaugaacacaucagcuag

SEQ ID NO: 2613 - RNA, 21 nt, Artificial
  synthetic
agucaugaacacaucagcuau

SEQ ID NO: 2614 - RNA, 21 nt, Artificial
  synthetic
gucaugaacacaucagcuagc

SEQ ID NO: 2615 - RNA, 21 nt, Artificial
  synthetic
gucaugaacacaucagcuagu

SEQ ID NO: 2616 - RNA, 21 nt, Artificial
  synthetic
augaacacaucagcuagcaac

SEQ ID NO: 2617 - RNA, 21 nt, Artificial
  synthetic
ugaacacaucagcuagcaaca

SEQ ID NO: 2618 - RNA, 21 nt, Artificial
  synthetic
aucagcuagcaacagaaguaa

SEQ ID NO: 2619 - RNA, 21 nt, Artificial
  synthetic
cagcuagcaacagaaguaaca

SEQ ID NO: 2620 - RNA, 21 nt, Artificial
  synthetic
cuagcaacagaaguaacaaga

SEQ ID NO: 2621 - RNA, 21 nt, Artificial
  synthetic
uagcaacagaaguaacaagag

SEQ ID NO: 2622 - RNA, 21 nt, Artificial
  synthetic
agaaguaacaagagugauucu

SEQ ID NO: 2623 - RNA, 21 nt, Artificial
  synthetic
agaaguaacaagagugauucu

SEQ ID NO: 2624 - RNA, 21 nt, Artificial
  synthetic
cuugcugcuauuaccgcuuua

SEQ ID NO: 2625 - RNA, 21 nt, Artificial
  synthetic
gcugcuauuaccgcuuuaaaa

SEQ ID NO: 2626 - RNA, 21 nt, Artificial
  synthetic
cccuuuuacuaaacuugacag

SEQ ID NO: 2627 - RNA, 21 nt, Artificial
  synthetic
cuuuuacuaaacuugacagaa

SEQ ID NO: 2628 - RNA, 21 nt, Artificial
  synthetic
uuuuacuaaacuugacagaag

SEQ ID NO: 2629 - RNA, 21 nt, Artificial
  synthetic
uacuaaacuugacagaaguuc

SEQ ID NO: 2630 - RNA, 21 nt, Artificial
  synthetic
cuaaacuugacagaaguucag

SEQ ID NO: 2631 - RNA, 21 nt, Artificial
  synthetic
acuugacagaaguucaguaaa

SEQ ID NO: 2632 - RNA, 21 nt, Artificial
  synthetic
ugacagaaguucaguaaauuc

SEQ ID NO: 2633 - RNA, 21 nt, Artificial
  synthetic
acagaaguucaguaaauucuu

SEQ ID NO: 2634 - RNA, 21 nt, Artificial
  synthetic
cagaaguucaguaaauucuua

SEQ ID NO: 2635 - RNA, 21 nt, Artificial
  synthetic
agaaguucaguaaauucuuac

SEQ ID NO: 2636 - RNA, 21 nt, Artificial
  synthetic
ccaaacugacggauuauuauu

SEQ ID NO: 2637 - RNA, 21 nt, Artificial
  synthetic
guuaagggaaaacuuuuacuu

SEQ ID NO: 2638 - RNA, 21 nt, Artificial
  synthetic
uuaagggaaaacuuuuacuuu

SEQ ID NO: 2639 - RNA, 21 nt, Artificial
  synthetic
uaagggaaaacuuuuacuuug

SEQ ID NO: 2640 - RNA, 21 nt, Artificial
  synthetic
agggaaaacuuuuacuuugua

SEQ ID NO: 2641 - RNA, 21 nt, Artificial
  synthetic
gggaaaacuuuuacuuuguag

SEQ ID NO: 2642 - RNA, 21 nt, Artificial
  synthetic
gaaaacuuuuacuuuguagau

SEQ ID NO: 2643 - RNA, 21 nt, Artificial
  synthetic
aaaacuuuuacuuuguagaua

SEQ ID NO: 2644 - RNA, 21 nt, Artificial
  synthetic
aaaacuuuuacuuuguagaua

SEQ ID NO: 2645 - RNA, 23 nt, Artificial
  synthetic
gacucuuuaccggaagucggagg

SEQ ID NO: 2646 - RNA, 23 nt, Artificial
  synthetic
ggacucuuuaccggaagucggag

SEQ ID NO: 2647 - RNA, 23 nt, Artificial
  synthetic
gggacucuuuaccggaagucgga

SEQ ID NO: 2648 - RNA, 23 nt, Artificial
  synthetic
uuuucacuuguacuucacauuug

SEQ ID NO: 2649 - RNA, 23 nt, Artificial
  synthetic
uuuuucacuuguacuucacauuu

SEQ ID NO: 2650 - RNA, 23 nt, Artificial
  synthetic
cauuuuucacuuguacuucacau

SEQ ID NO: 2651 - RNA, 23 nt, Artificial
  synthetic
ggauucuguacuuuucucaugug

SEQ ID NO: 2652 - RNA, 23 nt, Artificial
  synthetic
aaaucugaagugugagaagugga

SEQ ID NO: 2653 - RNA, 23 nt, Artificial
  synthetic
gaaaucugaagugugagaagugg

SEQ ID NO: 2654 - RNA, 23 nt, Artificial
  synthetic
ugaaaucugaagugugagaagug

SEQ ID NO: 2655 - RNA, 23 nt, Artificial
  synthetic
uugaaaucugaagugugagaagu

SEQ ID NO: 2656 - RNA, 23 nt, Artificial
  synthetic
guugaaaucugaagugugagaag

SEQ ID NO: 2657 - RNA, 23 nt, Artificial
  synthetic
gguugaaaucugaagugugagaa

SEQ ID NO: 2658 - RNA, 23 nt, Artificial
  synthetic
ggguugaaaucugaagugugaga

SEQ ID NO: 2659 - RNA, 23 nt, Artificial
  synthetic
cggguugaaaucugaagugugag

SEQ ID NO: 2660 - RNA, 23 nt, Artificial
  synthetic
auucggguugaaaucugaagugu

SEQ ID NO: 2661 - RNA, 23 nt, Artificial
  synthetic
auuaacuacucuuuggucugaac

SEQ ID NO: 2662 - RNA, 23 nt, Artificial
  synthetic
cauuaacuacucuuuggucugaa

SEQ ID NO: 2663 - RNA, 23 nt, Artificial
  synthetic
augcguuuaggcauaguagagac

SEQ ID NO: 2664 - RNA, 23 nt, Artificial
  synthetic
caugcguuuaggcauaguagaga

SEQ ID NO: 2665 - RNA, 23 nt, Artificial
  synthetic
gacaugcguuuaggcauaguaga

SEQ ID NO: 2666 - RNA, 23 nt, Artificial
  synthetic
guugauccauagauucagaagua

SEQ ID NO: 2667 - RNA, 23 nt, Artificial
  synthetic
aguugauccauagauucagaagu

SEQ ID NO: 2668 - RNA, 23 nt, Artificial
  synthetic
uaguugauccauagauucagaag

SEQ ID NO: 2669 - RNA, 23 nt, Artificial
  synthetic
guaguugauccauagauucagaa

SEQ ID NO: 2670 - RNA, 23 nt, Artificial
  synthetic
aguaguugauccauagauucaga

SEQ ID NO: 2671 - RNA, 23 nt, Artificial
  synthetic
uaguaguugauccauagauucag

SEQ ID NO: 2672 - RNA, 23 nt, Artificial
  synthetic
uuaguaguugauccauagauuca

SEQ ID NO: 2673 - RNA, 23 nt, Artificial
  synthetic
uuuaguaguugauccauagauuc

SEQ ID NO: 2674 - RNA, 23 nt, Artificial
  synthetic
gcgucauagguauuggguauaaa

SEQ ID NO: 2675 - RNA, 23 nt, Artificial
  synthetic
uuugguacugcucuauaugucuu

SEQ ID NO: 2676 - RNA, 23 nt, Artificial
  synthetic
auauuugguacugcucuauaugu

SEQ ID NO: 2677 - RNA, 23 nt, Artificial
  synthetic
cauauuugguacugcucuauaug

SEQ ID NO: 2678 - RNA, 23 nt, Artificial
  synthetic
gcauauuugguacugcucuauau

SEQ ID NO: 2679 - RNA, 23 nt, Artificial
  synthetic
gggcauauuugguacugcucuau

SEQ ID NO: 2680 - RNA, 23 nt, Artificial
  synthetic
guuguaugguaauuugggacaug

SEQ ID NO: 2681 - RNA, 23 nt, Artificial
  synthetic
uuguuguaugguaauuugggaca

SEQ ID NO: 2682 - RNA, 23 nt, Artificial
  synthetic
gcaaaguagaaagaagggcuugu

SEQ ID NO: 2683 - RNA, 23 nt, Artificial
  synthetic
auggcaaaguagaaagaagggcu

SEQ ID NO: 2684 - RNA, 23 nt, Artificial
  synthetic
aauggcaaaguagaaagaagggc

SEQ ID NO: 2685 - RNA, 23 nt, Artificial
  synthetic
aaauggcaaaguagaaagaaggg

SEQ ID NO: 2686 - RNA, 23 nt, Artificial
  synthetic
gaaauggcaaaguagaaagaagg

SEQ ID NO: 2687 - RNA, 23 nt, Artificial
  synthetic
ggaaauggcaaaguagaaagaag

SEQ ID NO: 2688 - RNA, 23 nt, Artificial
  synthetic
uggaaauggcaaaguagaaagaa

SEQ ID NO: 2689 - RNA, 23 nt, Artificial
  synthetic
guggaaauggcaaaguagaaaga

SEQ ID NO: 2690 - RNA, 23 nt, Artificial
  synthetic
cguggaaauggcaaaguagaaag

SEQ ID NO: 2691 - RNA, 23 nt, Artificial
  synthetic
aaccauuccugacuguacaugag

SEQ ID NO: 2692 - RNA, 23 nt, Artificial
  synthetic
gaaccauuccugacuguacauga

SEQ ID NO: 2693 - RNA, 23 nt, Artificial
  synthetic
ggaaccauuccugacuguacaug

SEQ ID NO: 2694 - RNA, 23 nt, Artificial
  synthetic
gaugagaaggaaccauuccugac

SEQ ID NO: 2695 - RNA, 23 nt, Artificial
  synthetic
uuggaugagaaggaaccauuccu

SEQ ID NO: 2696 - RNA, 23 nt, Artificial
  synthetic
aguuggaugagaaggaaccauuc

SEQ ID NO: 2697 - RNA, 23 nt, Artificial
  synthetic
caguuggaugagaaggaaccauu

SEQ ID NO: 2698 - RNA, 23 nt, Artificial
  synthetic
ggcaguuggaugagaaggaacca

SEQ ID NO: 2699 - RNA, 23 nt, Artificial
  synthetic
cauuagcaucauuggcgcauggg

SEQ ID NO: 2700 - RNA, 23 nt, Artificial
  synthetic
cgucauuagcaucauuggcgcau

SEQ ID NO: 2701 - RNA, 23 nt, Artificial
  synthetic
gucgucauuagcaucauuggcgc

SEQ ID NO: 2702 - RNA, 23 nt, Artificial
  synthetic
ugucgucauuagcaucauuggcg

SEQ ID NO: 2703 - RNA, 23 nt, Artificial
  synthetic
cugugucgucauuagcaucauug

SEQ ID NO: 2704 - RNA, 23 nt, Artificial
  synthetic
gcugugucgucauuagcaucauu

SEQ ID NO: 2705 - RNA, 23 nt, Artificial
  synthetic
ggcuguagugcacuuugagcgag

SEQ ID NO: 2706 - RNA, 23 nt, Artificial
  synthetic
uugucgagacuggaaugggcugu

SEQ ID NO: 2707 - RNA, 23 nt, Artificial
  synthetic
uguugucgagacuggaaugggcu

SEQ ID NO: 2708 - RNA, 23 nt, Artificial
  synthetic
uuacaacugcuguuggugguggg

SEQ ID NO: 2709 - RNA, 23 nt, Artificial
  synthetic
cuuacaacugcuguugguggugg

SEQ ID NO: 2710 - RNA, 23 nt, Artificial
  synthetic
ccuuacaacugcuguugguggug

SEQ ID NO: 2711 - RNA, 23 nt, Artificial
  synthetic
agccuuacaacugcuguuggugg

SEQ ID NO: 2712 - RNA, 23 nt, Artificial
  synthetic
gcagccuuacaacugcuguuggu

SEQ ID NO: 2713 - RNA, 23 nt, Artificial
  synthetic
aguugguagaagcaguagaaggg

SEQ ID NO: 2714 - RNA, 23 nt, Artificial
  synthetic
ccaguugguagaagcaguagaag

SEQ ID NO: 2715 - RNA, 23 nt, Artificial
  synthetic
uccaguugguagaagcaguagaa

SEQ ID NO: 2716 - RNA, 23 nt, Artificial
  synthetic
gcuuccaguugguagaagcagua

SEQ ID NO: 2717 - RNA, 23 nt, Artificial
  synthetic
aguuuucugugcuuccaguuggu

SEQ ID NO: 2718 - RNA, 23 nt, Artificial
  synthetic
uuggauguuacaagaaaucaaca

SEQ ID NO: 2719 - RNA, 23 nt, Artificial
  synthetic
cuauuggauguuacaagaaauca

SEQ ID NO: 2720 - RNA, 23 nt, Artificial
  synthetic
uccuauuggauguuacaagaaau

SEQ ID NO: 2721 - RNA, 23 nt, Artificial
  synthetic
uuccuauuggauguuacaagaaa

SEQ ID NO: 2722 - RNA, 23 nt, Artificial
  synthetic
gcauuccuauuggauguuacaag

SEQ ID NO: 2723 - RNA, 23 nt, Artificial
  synthetic
uagcauuccuauuggauguuaca

SEQ ID NO: 2724 - RNA, 23 nt, Artificial
  synthetic
uuagcauuccuauuggauguuac

SEQ ID NO: 2725 - RNA, 23 nt, Artificial
  synthetic
guuagcauuccuauuggauguua

SEQ ID NO: 2726 - RNA, 23 nt, Artificial
  synthetic
uguuagcauuccuauuggauguu

SEQ ID NO: 2727 - RNA, 23 nt, Artificial
  synthetic
ugaacuguuagcauuccuauugg

SEQ ID NO: 2728 - RNA, 23 nt, Artificial
  synthetic
gugaacuguuagcauuccuauug

SEQ ID NO: 2729 - RNA, 23 nt, Artificial
  synthetic
agugaacuguuagcauuccuauu

SEQ ID NO: 2730 - RNA, 23 nt, Artificial
  synthetic
aagugaacuguuagcauuccuau

SEQ ID NO: 2731 - RNA, 23 nt, Artificial
  synthetic
caagugaacuguuagcauuccua

SEQ ID NO: 2732 - RNA, 23 nt, Artificial
  synthetic
gcaagugaacuguuagcauuccu

SEQ ID NO: 2733 - RNA, 23 nt, Artificial
  synthetic
cacugcaagugaacuguuagcau

SEQ ID NO: 2734 - RNA, 23 nt, Artificial
  synthetic
ucuuccacugcaagugaacuguu

SEQ ID NO: 2735 - RNA, 23 nt, Artificial
  synthetic
ccuaaaugccucuacucggucca

SEQ ID NO: 2736 - RNA, 23 nt, Artificial
  synthetic
uccuaaaugccucuacucggucc

SEQ ID NO: 2737 - RNA, 23 nt, Artificial
  synthetic
auauggaauuauggaauagcccc

SEQ ID NO: 2738 - RNA, 23 nt, Artificial
  synthetic
aaauaacuuccaguuucggcaag

SEQ ID NO: 2739 - RNA, 23 nt, Artificial
  synthetic
auaaauaacuuccaguuucggca

SEQ ID NO: 2740 - RNA, 23 nt, Artificial
  synthetic
aauaaauaacuuccaguuucggc

SEQ ID NO: 2741 - RNA, 23 nt, Artificial
  synthetic
aaauaaauaacuuccaguuucgg

SEQ ID NO: 2742 - RNA, 23 nt, Artificial
  synthetic
aaaauaaauaacuuccaguuucg

SEQ ID NO: 2743 - RNA, 23 nt, Artificial
  synthetic
caugacuuucaaggguuauuaaa

SEQ ID NO: 2744 - RNA, 23 nt, Artificial
  synthetic
ucaugacuuucaaggguuauuaa

SEQ ID NO: 2745 - RNA, 23 nt, Artificial
  synthetic
uguucaugacuuucaaggguuau

SEQ ID NO: 2746 - RNA, 23 nt, Artificial
  synthetic
gauguguucaugacuuucaaggg

SEQ ID NO: 2747 - RNA, 23 nt, Artificial
  synthetic
cuagcugauguguucaugacuuu

SEQ ID NO: 2748 - RNA, 23 nt, Artificial
  synthetic
gcuagcugauguguucaugacuu

SEQ ID NO: 2749 - RNA, 23 nt, Artificial
  synthetic
ugcuagcugauguguucaugacu

SEQ ID NO: 2750 - RNA, 23 nt, Artificial
  synthetic
uugcuagcugauguguucaugac

SEQ ID NO: 2751 - RNA, 23 nt, Artificial
  synthetic
uugcuagcugauguguucaugac

SEQ ID NO: 2752 - RNA, 23 nt, Artificial
  synthetic
uuugcuagcugauguguucauga

SEQ ID NO: 2753 - RNA, 23 nt, Artificial
  synthetic
uuuugcuagcugauguguucaug

SEQ ID NO: 2754 - RNA, 23 nt, Artificial
  synthetic
cuuuugcuagcugauguguucau

SEQ ID NO: 2755 - RNA, 23 nt, Artificial
  synthetic
ucuuuugcuagcugauguguuca

SEQ ID NO: 2756 - RNA, 23 nt, Artificial
  synthetic
uacuucuuuugcuagcugaugug

SEQ ID NO: 2757 - RNA, 23 nt, Artificial
  synthetic
ucuuguuacuucuuuugcuagcu

SEQ ID NO: 2758 - RNA, 23 nt, Artificial
  synthetic
agcaagaaucacucuuguuacuu

SEQ ID NO: 2759 - RNA, 23 nt, Artificial
  synthetic
cagcaagaaucacucuuguuacu

SEQ ID NO: 2760 - RNA, 23 nt, Artificial
  synthetic
gcagcaagaaucacucuuguuac

SEQ ID NO: 2761 - RNA, 23 nt, Artificial
  synthetic
aauagcagcaagaaucacucuug

SEQ ID NO: 2762 - RNA, 23 nt, Artificial
  synthetic
uaauagcagcaagaaucacucuu

SEQ ID NO: 2763 - RNA, 23 nt, Artificial
  synthetic
aguaauagcagcaagaaucacuc

SEQ ID NO: 2764 - RNA, 23 nt, Artificial
  synthetic
uuuaguaaaagggcguuccaagu

SEQ ID NO: 2765 - RNA, 23 nt, Artificial
  synthetic
guuuaguaaaagggcguuccaag

SEQ ID NO: 2766 - RNA, 23 nt, Artificial
  synthetic
aaguuuaguaaaagggcguucca

SEQ ID NO: 2767 - RNA, 23 nt, Artificial
  synthetic
caaguuuaguaaaagggcguucc

SEQ ID NO: 2768 - RNA, 23 nt, Artificial
  synthetic
ucaaguuuaguaaaagggcguuc

SEQ ID NO: 2769 - RNA, 23 nt, Artificial
  synthetic
gucaaguuuaguaaaagggcguu

SEQ ID NO: 2770 - RNA, 23 nt, Artificial
  synthetic
acgguaagaauuuacugaaacuu

SEQ ID NO: 2771 - RNA, 23 nt, Artificial
  synthetic
gacgguaagaauuuacugaaacu

SEQ ID NO: 2772 - RNA, 23 nt, Artificial
  synthetic
ugacgguaagaauuuacugaaac

SEQ ID NO: 2773 - RNA, 23 nt, Artificial
  synthetic
uugacgguaagaauuuacugaaa

SEQ ID NO: 2774 - RNA, 23 nt, Artificial
  synthetic
uuugacgguaagaauuuacugaa

SEQ ID NO: 2775 - RNA, 23 nt, Artificial
  synthetic
guuugacgguaagaauuuacuga

SEQ ID NO: 2776 - RNA, 23 nt, Artificial
  synthetic
aguuugacgguaagaauuuacug

SEQ ID NO: 2777 - RNA, 23 nt, Artificial
  synthetic
caguuugacgguaagaauuuacu

SEQ ID NO: 2778 - RNA, 23 nt, Artificial
  synthetic
ucaguuugacgguaagaauuuac

SEQ ID NO: 2779 - RNA, 23 nt, Artificial
  synthetic
gucaguuugacgguaagaauuua

SEQ ID NO: 2780 - RNA, 23 nt, Artificial
  synthetic
cgucaguuugacgguaagaauuu

SEQ ID NO: 2781 - RNA, 23 nt, Artificial
  synthetic
ccgucaguuugacgguaagaauu

SEQ ID NO: 2782 - RNA, 23 nt, Artificial
  synthetic
uccgucaguuugacgguaagaau

SEQ ID NO: 2783 - RNA, 23 nt, Artificial
  synthetic
auccgucaguuugacgguaagaa

SEQ ID NO: 2784 - RNA, 23 nt, Artificial
  synthetic
aauccgucaguuugacgguaaga

SEQ ID NO: 2785 - RNA, 23 nt, Artificial
  synthetic
uaauccgucaguuugacgguaag

SEQ ID NO: 2786 - RNA, 23 nt, Artificial
  synthetic
uaauccgucaguuugacgguaag

SEQ ID NO: 2787 - RNA, 23 nt, Artificial
  synthetic
auaauccgucaguuugacgguaa

SEQ ID NO: 2788 - RNA, 23 nt, Artificial
  synthetic
auaaauaauaauccgucaguuug

SEQ ID NO: 2789 - RNA, 23 nt, Artificial
  synthetic
cagugaucaccucaucaaacuug

SEQ ID NO: 2790 - RNA, 23 nt, Artificial
  synthetic
aguugaaccacuguagacaguga

SEQ ID NO: 2791 - RNA, 23 nt, Artificial
  synthetic
aaguugaaccacuguagacagug

SEQ ID NO: 2792 - RNA, 23 nt, Artificial
  synthetic
uuaaaaguugaaccacuguagac

SEQ ID NO: 2793 - RNA, 23 nt, Artificial
  synthetic
cuuaaaaguugaaccacuguaga

SEQ ID NO: 2794 - RNA, 23 nt, Artificial
  synthetic
uucccuuaacuuaaaaguugaac

SEQ ID NO: 2795 - RNA, 23 nt, Artificial
  synthetic
uuuucccuuaacuuaaaaguuga

SEQ ID NO: 2796 - RNA, 23 nt, Artificial
  synthetic
aucuacaaaguaaaaguuuuucc

SEQ ID NO: 2797 - RNA, 23 nt, Artificial
  synthetic
caaaagaaaucguagacugaggc

SEQ ID NO: 2798 - RNA, 23 nt, Artificial
  synthetic
ucaaaagaaaucguagacugagg

SEQ ID NO: 2799 - RNA, 23 nt, Artificial
  synthetic
aucaaaagaaaucguagacugag

SEQ ID NO: 2800 - RNA, 23 nt, Artificial
  synthetic
ggauucuguacuuuucucaugug

SEQ ID NO: 2801 - RNA, 23 nt, Artificial
  synthetic
ggauucuguacuuuucucaugug

SEQ ID NO: 2802 - RNA, 23 nt, Artificial
  synthetic
cacaacaaagucugaacauuuga

SEQ ID NO: 2803 - RNA, 23 nt, Artificial
  synthetic
uucacuuuagcacugauagcaga

SEQ ID NO: 2804 - RNA, 23 nt, Artificial
  synthetic
aagauaaacugcuaucauacgua

SEQ ID NO: 2805 - RNA, 23 nt, Artificial
  synthetic
gaagauaaacugcuaucauacgu

SEQ ID NO: 2806 - RNA, 23 nt, Artificial
  synthetic
uaaaaauucuucugaguuaucuc

SEQ ID NO: 2807 - RNA, 23 nt, Artificial
  synthetic
ucugaagugugagaaguggaucu

SEQ ID NO: 2808 - RNA, 23 nt, Artificial
  synthetic
guugaaaucugaagugugagaag

SEQ ID NO: 2809 - RNA, 23 nt, Artificial
  synthetic
augcguuuaggcauaguagagac

SEQ ID NO: 2810 - RNA, 23 nt, Artificial
  synthetic
caugcguuuaggcauaguagaga

SEQ ID NO: 2811 - RNA, 23 nt, Artificial
  synthetic
gcagaaacucugugauuucgagg

SEQ ID NO: 2812 - RNA, 23 nt, Artificial
  synthetic
agcagaaacucugugauuucgag

SEQ ID NO: 2813 - RNA, 23 nt, Artificial
  synthetic
ccauagauucagaaguagaacuu

SEQ ID NO: 2814 - RNA, 23 nt, Artificial
  synthetic
uccauagauucagaaguagaacu

SEQ ID NO: 2815 - RNA, 23 nt, Artificial
  synthetic
auccauagauucagaaguagaac

SEQ ID NO: 2816 - RNA, 23 nt, Artificial
  synthetic
gauccauagauucagaaguagaa

SEQ ID NO: 2817 - RNA, 23 nt, Artificial
  synthetic
aguaguugauccauagauucaga

SEQ ID NO: 2818 - RNA, 23 nt, Artificial
  synthetic
aguaguugauccauagauucaga

SEQ ID NO: 2819 - RNA, 23 nt, Artificial
  synthetic
ucucuauuuuuguuuaguaguug

SEQ ID NO: 2820 - RNA, 23 nt, Artificial
  synthetic
aaagaauccuuagcacuugguuc

SEQ ID NO: 2821 - RNA, 23 nt, Artificial
  synthetic
gauucaauguugauuuccuaacu

SEQ ID NO: 2822 - RNA, 23 nt, Artificial
  synthetic
gaguauaaacuggaguuggcugu

SEQ ID NO: 2823 - RNA, 23 nt, Artificial
  synthetic
ccguacugaguugcugaagaaga

SEQ ID NO: 2824 - RNA, 23 nt, Artificial
  synthetic
guggaaauggcaaaguagaaaga

SEQ ID NO: 2825 - RNA, 23 nt, Artificial
  synthetic
cguggaaauggcaaaguagaaag

SEQ ID NO: 2826 - RNA, 23 nt, Artificial
  synthetic
uuccuauuggauguuacaagaaa

SEQ ID NO: 2827 - RNA, 23 nt, Artificial
  synthetic
auaaauaacuuccaguuucggca

SEQ ID NO: 2828 - RNA, 23 nt, Artificial
  synthetic
auaaauaacuuccaguuucggca

SEQ ID NO: 2829 - RNA, 23 nt, Artificial
  synthetic
auaaauaacuuccaguuucggca

SEQ ID NO: 2830 - RNA, 23 nt, Artificial
  synthetic
aaaauaaauaacuuccaguuucg

SEQ ID NO: 2831 - RNA, 23 nt, Artificial
  synthetic
gauguguucaugacuuucaaggg

SEQ ID NO: 2832 - RNA, 23 nt, Artificial
  synthetic
gauguguucaugacuuucaaggg

SEQ ID NO: 2833 - RNA, 23 nt, Artificial
  synthetic
cuagcugauguguucaugacuuu

SEQ ID NO: 2834 - RNA, 23 nt, Artificial
  synthetic
cuagcugauguguucaugacuuu

SEQ ID NO: 2835 - RNA, 23 nt, Artificial
  synthetic
cuagcugauguguucaugacuuu

SEQ ID NO: 2836 - RNA, 23 nt, Artificial
  synthetic
gcuagcugauguguucaugacuu

SEQ ID NO: 2837 - RNA, 23 nt, Artificial
  synthetic
gcuagcugauguguucaugacuu

SEQ ID NO: 2838 - RNA, 23 nt, Artificial
  synthetic
uugcuagcugauguguucaugac

SEQ ID NO: 2839 - RNA, 23 nt, Artificial
  synthetic
aauagcagcaagaaucacucuug

SEQ ID NO: 2840 - RNA, 23 nt, Artificial
  synthetic
aauagcagcaagaaucacucuug

SEQ ID NO: 2841 - RNA, 23 nt, Artificial
  synthetic
aguaauagcagcaagaaucacuc

SEQ ID NO: 2842 - RNA, 23 nt, Artificial
  synthetic
aguaauagcagcaagaaucacuc

SEQ ID NO: 2843 - RNA, 23 nt, Artificial
  synthetic
gucaaguuuaguaaaagggcguu

SEQ ID NO: 2844 - RNA, 23 nt, Artificial
  synthetic
gucaaguuuaguaaaagggcguu

SEQ ID NO: 2845 - RNA, 23 nt, Artificial
  synthetic
uaauccgucaguuugacgguaag

SEQ ID NO: 2846 - RNA, 23 nt, Artificial
  synthetic
aguugaaccacuguagacaguga

SEQ ID NO: 2847 - RNA, 23 nt, Artificial
  synthetic
aguugaaccacuguagacaguga

SEQ ID NO: 2848 - RNA, 23 nt, Artificial
  synthetic
uaacuuaaaaguugaaccacugu

SEQ ID NO: 2849 - RNA, 23 nt, Artificial
  synthetic
uuaacuuaaaaguugaaccacug

SEQ ID NO: 2850 - RNA, 23 nt, Artificial
  synthetic
aaaguaaaaguuuuucccuuaac

SEQ ID NO: 2851 - RNA, 23 nt, Artificial
  synthetic
aaaagaaaucguaggcugaggca

SEQ ID NO: 2852 - RNA, 23 nt, Artificial
  synthetic
caaaagaaaucguaggcugaggc

SEQ ID NO: 2853 - RNA, 23 nt, Artificial
  synthetic
ucaaaagaaaucguaggcugagg

SEQ ID NO: 2854 - RNA, 23 nt, Artificial
  synthetic
guaaguauaugaaccauccucac

SEQ ID NO: 2855 - RNA, 23 nt, Artificial
  synthetic
auaaguauaugaaccauccucac

SEQ ID NO: 2856 - RNA, 23 nt, Artificial
  synthetic
cguaaguauaugaaccauccuca

SEQ ID NO: 2857 - RNA, 23 nt, Artificial
  synthetic
uuuucacuuguacuucacauuuc

SEQ ID NO: 2858 - RNA, 23 nt, Artificial
  synthetic
uuuucacuuguacuucacauuuc

SEQ ID NO: 2859 - RNA, 23 nt, Artificial
  synthetic
cguuuuucacuuguacuucacau

SEQ ID NO: 2860 - RNA, 23 nt, Artificial
  synthetic
uguauguuuuaaaaacuccuuca

SEQ ID NO: 2861 - RNA, 23 nt, Artificial
  synthetic
cuguauguuuuaaaaacuccuuc

SEQ ID NO: 2862 - RNA, 23 nt, Artificial
  synthetic
cacacuuaggacuguauguuuua

SEQ ID NO: 2863 - RNA, 23 nt, Artificial
  synthetic
ucacacuuaggacuguauguuuu

SEQ ID NO: 2864 - RNA, 23 nt, Artificial
  synthetic
gucacacuuaggacuguauguuu

SEQ ID NO: 2865 - RNA, 23 nt, Artificial
  synthetic
uguacuuuucucaugugcagcau

SEQ ID NO: 2866 - RNA, 23 nt, Artificial
  synthetic
cuguacuuuucucaugugcagca

SEQ ID NO: 2867 - RNA, 23 nt, Artificial
  synthetic
uuugaacaaaacacucuccauua

SEQ ID NO: 2868 - RNA, 23 nt, Artificial
  synthetic
cauuugaacaaaacacucuccau

SEQ ID NO: 2869 - RNA, 23 nt, Artificial
  synthetic
aagucugagcauuugaacaaaac

SEQ ID NO: 2870 - RNA, 23 nt, Artificial
  synthetic
cgaagucugagcauuugaacaaa

SEQ ID NO: 2871 - RNA, 23 nt, Artificial
  synthetic
acgaagucugagcauuugaacaa

SEQ ID NO: 2872 - RNA, 23 nt, Artificial
  synthetic
aacgaagucugagcauuugaaca

SEQ ID NO: 2873 - RNA, 23 nt, Artificial
  synthetic
caacgaagucugagcauuugaac

SEQ ID NO: 2874 - RNA, 23 nt, Artificial
  synthetic
acaacgaagucugagcauuugaa

SEQ ID NO: 2875 - RNA, 23 nt, Artificial
  synthetic
cacaacgaagucugagcauuuga

SEQ ID NO: 2876 - RNA, 23 nt, Artificial
  synthetic
ccacaacgaagucugagcauuug

SEQ ID NO: 2877 - RNA, 23 nt, Artificial
  synthetic
cuucauuauaucgaaacauguca

SEQ ID NO: 2878 - RNA, 23 nt, Artificial
  synthetic
ggaaccguauaugaagauaaacu

SEQ ID NO: 2879 - RNA, 23 nt, Artificial
  synthetic
aaauucuucugaguugucccuuu

SEQ ID NO: 2880 - RNA, 23 nt, Artificial
  synthetic
gaaauucuucugaguugucccuu

SEQ ID NO: 2881 - RNA, 23 nt, Artificial
  synthetic
agaaauucuucugaguugucccu

SEQ ID NO: 2882 - RNA, 23 nt, Artificial
  synthetic
aagaaauucuucugaguuguccc

SEQ ID NO: 2883 - RNA, 23 nt, Artificial
  synthetic
aaaucugaagugugagaagcagc

SEQ ID NO: 2884 - RNA, 23 nt, Artificial
  synthetic
gaaaucugaagugugagaagcag

SEQ ID NO: 2885 - RNA, 23 nt, Artificial
  synthetic
ugaaaucugaagugugagaagca

SEQ ID NO: 2886 - RNA, 23 nt, Artificial
  synthetic
ugaaaucugaagugugagaagca

SEQ ID NO: 2887 - RNA, 23 nt, Artificial
  synthetic
uugaaaucugaagugugagaagc

SEQ ID NO: 2888 - DNA, 23 bp, Artificial
  synthetic
uugaaatcugaagugugagaagc

SEQ ID NO: 2889 - RNA, 23 nt, Artificial
  synthetic
auuaacuacucuuuggucugagc

SEQ ID NO: 2890 - DNA, 23 bp, Artificial
  synthetic
auuaactacucuuuggucugagc

SEQ ID NO: 2891 - RNA, 23 nt, Artificial
  synthetic
cauuaacuacucuuuggucugag

SEQ ID NO: 2892 - RNA, 23 nt, Artificial
  synthetic
aauuaacuacucuuuggucugag

SEQ ID NO: 2893 - RNA, 23 nt, Artificial
  synthetic
gauugugggauacaaauucuagg

SEQ ID NO: 2894 - RNA, 23 nt, Artificial
  synthetic
ggauugugggauacaaauucuag

SEQ ID NO: 2895 - RNA, 23 nt, Artificial
  synthetic
gggauugugggauacaaauucua

SEQ ID NO: 2896 - RNA, 23 nt, Artificial
  synthetic
aaaagcuaggugauguuucacuu

SEQ ID NO: 2897 - RNA, 23 nt, Artificial
  synthetic
gaaaagcuaggugauguuucacu

SEQ ID NO: 2898 - RNA, 23 nt, Artificial
  synthetic
ugaaaagcuaggugauguuucac

SEQ ID NO: 2899 - RNA, 23 nt, Artificial
  synthetic
uugaaaagcuaggugauguuuca

SEQ ID NO: 2900 - RNA, 23 nt, Artificial
  synthetic
uuugaaaagcuaggugauguuuc

SEQ ID NO: 2901 - RNA, 23 nt, Artificial
  synthetic
uuuugaaaagcuaggugauguuu

SEQ ID NO: 2902 - RNA, 23 nt, Artificial
  synthetic
cuuuugaaaagcuaggugauguu

SEQ ID NO: 2903 - RNA, 23 nt, Artificial
  synthetic
gcuuuugaaaagcuaggugaugu

SEQ ID NO: 2904 - RNA, 23 nt, Artificial
  synthetic
agcuuuugaaaagcuaggugaug

SEQ ID NO: 2905 - RNA, 23 nt, Artificial
  synthetic
cagcuuuugaaaagcuaggugau

SEQ ID NO: 2906 - RNA, 23 nt, Artificial
  synthetic
ucagcuuuugaaaagcuagguga

SEQ ID NO: 2907 - RNA, 23 nt, Artificial
  synthetic
gucagcuuuugaaaagcuaggug

SEQ ID NO: 2908 - RNA, 23 nt, Artificial
  synthetic
guugauccauagauucagaugua

SEQ ID NO: 2909 - RNA, 23 nt, Artificial
  synthetic
aguugauccauagauucagaugu

SEQ ID NO: 2910 - RNA, 23 nt, Artificial
  synthetic
uaguugauccauagauucagaug

SEQ ID NO: 2911 - RNA, 23 nt, Artificial
  synthetic
uaguugauccauagauucagaug

SEQ ID NO: 2912 - RNA, 23 nt, Artificial
  synthetic
guaguugauccauagauucagau

SEQ ID NO: 2913 - RNA, 23 nt, Artificial
  synthetic
auaguugauccauagauucagau

SEQ ID NO: 2914 - RNA, 23 nt, Artificial
  synthetic
cuuaguaguugauccauagauuc

SEQ ID NO: 2915 - RNA, 23 nt, Artificial
  synthetic
gcuuaguaguugauccauagauu

SEQ ID NO: 2916 - RNA, 23 nt, Artificial
  synthetic
ugcuuaguaguugauccauagau

SEQ ID NO: 2917 - RNA, 23 nt, Artificial
  synthetic
uugcuuaguaguugauccauaga

SEQ ID NO: 2918 - RNA, 23 nt, Artificial
  synthetic
uuugcuuaguaguugauccauag

SEQ ID NO: 2919 - RNA, 23 nt, Artificial
  synthetic
uuuugcuuaguaguugauccaua

SEQ ID NO: 2920 - RNA, 23 nt, Artificial
  synthetic
uuuuugcuuaguaguugauccau

SEQ ID NO: 2921 - RNA, 23 nt, Artificial
  synthetic
auuuuugcuuaguaguugaucca

SEQ ID NO: 2922 - RNA, 23 nt, Artificial
  synthetic
aaucucgugacuuuucuccuucu

SEQ ID NO: 2923 - RNA, 23 nt, Artificial
  synthetic
aaagaacgaggguugaacuccuu

SEQ ID NO: 2924 - RNA, 23 nt, Artificial
  synthetic
gagaaagaacgaggguugaacuc

SEQ ID NO: 2925 - RNA, 23 nt, Artificial
  synthetic
agagaaagaacgaggguugaacu

SEQ ID NO: 2926 - RNA, 23 nt, Artificial
  synthetic
gagagaaagaacgaggguugaac

SEQ ID NO: 2927 - RNA, 23 nt, Artificial
  synthetic
ugagagaaagaacgaggguugaa

SEQ ID NO: 2928 - RNA, 23 nt, Artificial
  synthetic
cugagagaaagaacgaggguuga

SEQ ID NO: 2929 - RNA, 23 nt, Artificial
  synthetic
cuuuggcugagagaaagaacgag

SEQ ID NO: 2930 - RNA, 23 nt, Artificial
  synthetic
gcuuuggcugagagaaagaacga

SEQ ID NO: 2931 - RNA, 23 nt, Artificial
  synthetic
auuaccuuguaugacaggacugu

SEQ ID NO: 2932 - RNA, 23 nt, Artificial
  synthetic
cauuaccuuguaugacaggacug

SEQ ID NO: 2933 - RNA, 23 nt, Artificial
  synthetic
cuggcauuaccuuguaugacagg

SEQ ID NO: 2934 - RNA, 23 nt, Artificial
  synthetic
ccuggcauuaccuuguaugacag

SEQ ID NO: 2935 - RNA, 23 nt, Artificial
  synthetic
cgguggaaauggcaaaguagaaa

SEQ ID NO: 2936 - RNA, 23 nt, Artificial
  synthetic
aaguucuaguuuucugugcuucc

SEQ ID NO: 2937 - RNA, 23 nt, Artificial
  synthetic
ugaaguucuaguuuucugugcuu

SEQ ID NO: 2938 - RNA, 23 nt, Artificial
  synthetic
aaugaaguucuaguuuucugugc

SEQ ID NO: 2939 - RNA, 23 nt, Artificial
  synthetic
caaugaaguucuaguuuucugug

SEQ ID NO: 2940 - RNA, 23 nt, Artificial
  synthetic
aacuuccaguuucagcaagcaga

SEQ ID NO: 2941 - RNA, 23 nt, Artificial
  synthetic
auaaauaacuuccaguuucagca

SEQ ID NO: 2942 - RNA, 23 nt, Artificial
  synthetic
aauaaauaacuuccaguuucagc

SEQ ID NO: 2943 - RNA, 23 nt, Artificial
  synthetic
aaauaaauaacuuccaguuucag

SEQ ID NO: 2944 - RNA, 23 nt, Artificial
  synthetic
aaauaaauaacuuccaguuucag

SEQ ID NO: 2945 - RNA, 23 nt, Artificial
  synthetic
ugauguguucaugacucucaagg

SEQ ID NO: 2946 - RNA, 23 nt, Artificial
  synthetic
cuagcugauguguucaugacucu

SEQ ID NO: 2947 - RNA, 23 nt, Artificial
  synthetic
auagcugauguguucaugacucu

SEQ ID NO: 2948 - RNA, 23 nt, Artificial
  synthetic
gcuagcugauguguucaugacuc

SEQ ID NO: 2949 - DNA, 23 bp, Artificial
  synthetic
acuagctgauguguucaugacuc

SEQ ID NO: 2950 - RNA, 23 nt, Artificial
  synthetic
guugcuagcugauguguucauga

SEQ ID NO: 2951 - RNA, 23 nt, Artificial
  synthetic
uguugcuagcugauguguucaug

SEQ ID NO: 2952 - RNA, 23 nt, Artificial
  synthetic
uuacuucuguugcuagcugaugu

SEQ ID NO: 2953 - RNA, 23 nt, Artificial
  synthetic
uguuacuucuguugcuagcugau

SEQ ID NO: 2954 - RNA, 23 nt, Artificial
  synthetic
ucuuguuacuucuguugcuagcu

SEQ ID NO: 2955 - RNA, 23 nt, Artificial
  synthetic
cucuuguuacuucuguugcuagc

SEQ ID NO: 2956 - RNA, 23 nt, Artificial
  synthetic
agaaucacucuuguuacuucugu

SEQ ID NO: 2957 - RNA, 23 nt, Artificial
  synthetic
agaaucacucuuguuacuucugu

SEQ ID NO: 2958 - RNA, 23 nt, Artificial
  synthetic
uaaagcgguaauagcagcaagaa

SEQ ID NO: 2959 - RNA, 23 nt, Artificial
  synthetic
uuuuaaagcgguaauagcagcaa

SEQ ID NO: 2960 - RNA, 23 nt, Artificial
  synthetic
cugucaaguuuaguaaaagggcg

SEQ ID NO: 2961 - RNA, 23 nt, Artificial
  synthetic
uucugucaaguuuaguaaaaggg

SEQ ID NO: 2962 - RNA, 23 nt, Artificial
  synthetic
cuucugucaaguuuaguaaaagg

SEQ ID NO: 2963 - RNA, 23 nt, Artificial
  synthetic
gaacuucugucaaguuuaguaaa

SEQ ID NO: 2964 - RNA, 23 nt, Artificial
  synthetic
cugaacuucugucaaguuuagua

SEQ ID NO: 2965 - RNA, 23 nt, Artificial
  synthetic
uuuacugaacuucugucaaguuu

SEQ ID NO: 2966 - RNA, 23 nt, Artificial
  synthetic
gaauuuacugaacuucugucaag

SEQ ID NO: 2967 - RNA, 23 nt, Artificial
  synthetic
aagaauuuacugaacuucuguca

SEQ ID NO: 2968 - RNA, 23 nt, Artificial
  synthetic
uaagaauuuacugaacuucuguc

SEQ ID NO: 2969 - RNA, 23 nt, Artificial
  synthetic
guaagaauuuacugaacuucugu

SEQ ID NO: 2970 - RNA, 23 nt, Artificial
  synthetic
aauaauaauccgucaguuuggcg

SEQ ID NO: 2971 - RNA, 23 nt, Artificial
  synthetic
aaguaaaaguuuucccuuaacuu

SEQ ID NO: 2972 - RNA, 23 nt, Artificial
  synthetic
aaaguaaaaguuuucccuuaacu

SEQ ID NO: 2973 - RNA, 23 nt, Artificial
  synthetic
caaaguaaaaguuuucccuuaac

SEQ ID NO: 2974 - RNA, 23 nt, Artificial
  synthetic
uacaaaguaaaaguuuucccuua

SEQ ID NO: 2975 - RNA, 23 nt, Artificial
  synthetic
cuacaaaguaaaaguuuucccuu

SEQ ID NO: 2976 - RNA, 23 nt, Artificial
  synthetic
aucuacaaaguaaaaguuuuccc

SEQ ID NO: 2977 - RNA, 23 nt, Artificial
  synthetic
uaucuacaaaguaaaaguuuucc

SEQ ID NO: 2978 - RNA, 23 nt, Artificial
  synthetic
uaucuacaaaguaaaaguuuucc

SEQ ID NO: 2979 - RNA, 21 nt, Artificial
  synthetic
uccgacuuccgguaaagagua

SEQ ID NO: 2980 - RNA, 21 nt, Artificial
  synthetic
ccgacuuccgguaaagaguca

SEQ ID NO: 2981 - RNA, 21 nt, Artificial
  synthetic
cgacuuccgguaaagagucca

SEQ ID NO: 2982 - RNA, 21 nt, Artificial
  synthetic
aaugugaaguacaagugaaaa

SEQ ID NO: 2983 - RNA, 21 nt, Artificial
  synthetic
augugaaguacaagugaaaaa

SEQ ID NO: 2984 - RNA, 21 nt, Artificial
  synthetic
gugaaguacaagugaaaaaua

SEQ ID NO: 2985 - RNA, 21 nt, Artificial
  synthetic
caugagaaaaguacagaauca

SEQ ID NO: 2986 - RNA, 21 nt, Artificial
  synthetic
cacuucucacacuucagauua

SEQ ID NO: 2987 - RNA, 21 nt, Artificial
  synthetic
acuucucacacuucagauuua

SEQ ID NO: 2988 - RNA, 21 nt, Artificial
  synthetic
cuucucacacuucagauuuca

SEQ ID NO: 2989 - RNA, 21 nt, Artificial
  synthetic
uucucacacuucagauuucaa

SEQ ID NO: 2990 - RNA, 21 nt, Artificial
  synthetic
ucucacacuucagauuucaaa

SEQ ID NO: 2991 - RNA, 21 nt, Artificial
  synthetic
cucacacuucagauuucaaca

SEQ ID NO: 2992 - RNA, 21 nt, Artificial
  synthetic
ucacacuucagauuucaacca

SEQ ID NO: 2993 - RNA, 21 nt, Artificial
  synthetic
cacacuucagauuucaaccca

SEQ ID NO: 2994 - RNA, 21 nt, Artificial
  synthetic
acuucagauuucaacccgaaa

SEQ ID NO: 2995 - RNA, 21 nt, Artificial
  synthetic
ucagaccaaagaguaguuaaa

SEQ ID NO: 2996 - RNA, 21 nt, Artificial
  synthetic
cagaccaaagaguaguuaaua

SEQ ID NO: 2997 - RNA, 21 nt, Artificial
  synthetic
cucuacuaugccuaaacgcaa

SEQ ID NO: 2998 - RNA, 21 nt, Artificial
  synthetic
ucuacuaugccuaaacgcaua

SEQ ID NO: 2999 - RNA, 21 nt, Artificial
  synthetic
uacuaugccuaaacgcaugua

SEQ ID NO: 3000 - RNA, 21 nt, Artificial
  synthetic
cuucugaaucuauggaucaaa

SEQ ID NO: 3001 - RNA, 21 nt, Artificial
  synthetic
uucugaaucuauggaucaaca

SEQ ID NO: 3002 - RNA, 21 nt, Artificial
  synthetic
ucugaaucuauggaucaacua

SEQ ID NO: 3003 - RNA, 21 nt, Artificial
  synthetic
cugaaucuauggaucaacuaa

SEQ ID NO: 3004 - RNA, 21 nt, Artificial
  synthetic
ugaaucuauggaucaacuaca

SEQ ID NO: 3005 - RNA, 21 nt, Artificial
  synthetic
gaaucuauggaucaacuacua

SEQ ID NO: 3006 - RNA, 21 nt, Artificial
  synthetic
aaucuauggaucaacuacuaa

SEQ ID NO: 3007 - RNA, 21 nt, Artificial
  synthetic
aucuauggaucaacuacuaaa

SEQ ID NO: 3008 - RNA, 21 nt, Artificial
  synthetic
uauacccaauaccuaugacga

SEQ ID NO: 3009 - RNA, 21 nt, Artificial
  synthetic
gacauauagagcaguaccaaa

SEQ ID NO: 3010 - RNA, 21 nt, Artificial
  synthetic
auauagagcaguaccaaauaa

SEQ ID NO: 3011 - RNA, 21 nt, Artificial
  synthetic
uauagagcaguaccaaauaua

SEQ ID NO: 3012 - RNA, 21 nt, Artificial
  synthetic
auagagcaguaccaaauauga

SEQ ID NO: 3013 - RNA, 21 nt, Artificial
  synthetic
agagcaguaccaaauaugcca

SEQ ID NO: 3014 - RNA, 21 nt, Artificial
  synthetic
ugucccaaauuaccauacaaa

SEQ ID NO: 3015 - RNA, 21 nt, Artificial
  synthetic
ucccaaauuaccauacaacaa

SEQ ID NO: 3016 - RNA, 21 nt, Artificial
  synthetic
aagcccuucuuucuacuuuga

SEQ ID NO: 3017 - RNA, 21 nt, Artificial
  synthetic
cccuucuuucuacuuugccaa

SEQ ID NO: 3018 - RNA, 21 nt, Artificial
  synthetic
ccuucuuucuacuuugccaua

SEQ ID NO: 3019 - RNA, 21 nt, Artificial
  synthetic
cuucuuucuacuuugccauua

SEQ ID NO: 3020 - RNA, 21 nt, Artificial
  synthetic
uucuuucuacuuugccauuua

SEQ ID NO: 3021 - RNA, 21 nt, Artificial
  synthetic
ucuuucuacuuugccauuuca

SEQ ID NO: 3022 - RNA, 21 nt, Artificial
  synthetic
cuuucuacuuugccauuucca

SEQ ID NO: 3023 - RNA, 21 nt, Artificial
  synthetic
uuucuacuuugccauuuccaa

SEQ ID NO: 3024 - RNA, 21 nt, Artificial
  synthetic
uucuacuuugccauuuccaca

SEQ ID NO: 3025 - RNA, 21 nt, Artificial
  synthetic
cauguacagucaggaauggua

SEQ ID NO: 3026 - RNA, 21 nt, Artificial
  synthetic
auguacagucaggaaugguua

SEQ ID NO: 3027 - RNA, 21 nt, Artificial
  synthetic
uguacagucaggaaugguuca

SEQ ID NO: 3028 - RNA, 21 nt, Artificial
  synthetic
caggaaugguuccuucucaua

SEQ ID NO: 3029 - RNA, 21 nt, Artificial
  synthetic
gaaugguuccuucucauccaa

SEQ ID NO: 3030 - RNA, 21 nt, Artificial
  synthetic
augguuccuucucauccaaca

SEQ ID NO: 3031 - RNA, 21 nt, Artificial
  synthetic
ugguuccuucucauccaacua

SEQ ID NO: 3032 - RNA, 21 nt, Artificial
  synthetic
guuccuucucauccaacugca

SEQ ID NO: 3033 - RNA, 21 nt, Artificial
  synthetic
caugcgccaaugaugcuaaua

SEQ ID NO: 3034 - RNA, 21 nt, Artificial
  synthetic
gcgccaaugaugcuaaugaca

SEQ ID NO: 3035 - RNA, 21 nt, Artificial
  synthetic
gccaaugaugcuaaugacgaa

SEQ ID NO: 3036 - RNA, 21 nt, Artificial
  synthetic
ccaaugaugcuaaugacgaca

SEQ ID NO: 3037 - RNA, 21 nt, Artificial
  synthetic
augaugcuaaugacgacacaa

SEQ ID NO: 3038 - RNA, 21 nt, Artificial
  synthetic
ugaugcuaaugacgacacaga

SEQ ID NO: 3039 - RNA, 21 nt, Artificial
  synthetic
cgcucaaagugcacuacagca

SEQ ID NO: 3040 - RNA, 21 nt, Artificial
  synthetic
agcccauuccagucucgacaa

SEQ ID NO: 3041 - RNA, 21 nt, Artificial
  synthetic
cccauuccagucucgacaaca

SEQ ID NO: 3042 - RNA, 21 nt, Artificial
  synthetic
caccaccaacagcaguuguaa

SEQ ID NO: 3043 - RNA, 21 nt, Artificial
  synthetic
accaccaacagcaguuguaaa

SEQ ID NO: 3044 - RNA, 21 nt, Artificial
  synthetic
ccaccaacagcaguuguaaga

SEQ ID NO: 3045 - RNA, 21 nt, Artificial
  synthetic
accaacagcaguuguaaggca

SEQ ID NO: 3046 - RNA, 21 nt, Artificial
  synthetic
caacagcaguuguaaggcuga

SEQ ID NO: 3047 - RNA, 21 nt, Artificial
  synthetic
cuucuacugcuucuaccaaca

SEQ ID NO: 3048 - RNA, 21 nt, Artificial
  synthetic
ucuacugcuucuaccaacuga

SEQ ID NO: 3049 - RNA, 21 nt, Artificial
  synthetic
cuacugcuucuaccaacugga

SEQ ID NO: 3050 - RNA, 21 nt, Artificial
  synthetic
cugcuucuaccaacuggaaga

SEQ ID NO: 3051 - RNA, 21 nt, Artificial
  synthetic
caacuggaagcacagaaaaca

SEQ ID NO: 3052 - RNA, 21 nt, Artificial
  synthetic
uugauuucuuguaacauccaa

SEQ ID NO: 3053 - RNA, 21 nt, Artificial
  synthetic
auuucuuguaacauccaauaa

SEQ ID NO: 3054 - RNA, 21 nt, Artificial
  synthetic
uucuuguaacauccaauagga

SEQ ID NO: 3055 - RNA, 21 nt, Artificial
  synthetic
ucuuguaacauccaauaggaa

SEQ ID NO: 3056 - RNA, 21 nt, Artificial
  synthetic
uguaacauccaauaggaauga

SEQ ID NO: 3057 - RNA, 21 nt, Artificial
  synthetic
uaacauccaauaggaaugcua

SEQ ID NO: 3058 - RNA, 21 nt, Artificial
  synthetic
aacauccaauaggaaugcuaa

SEQ ID NO: 3059 - RNA, 21 nt, Artificial
  synthetic
acauccaauaggaaugcuaaa

SEQ ID NO: 3060 - RNA, 21 nt, Artificial
  synthetic
cauccaauaggaaugcuaaca

SEQ ID NO: 3061 - RNA, 21 nt, Artificial
  synthetic
aauaggaaugcuaacaguuca

SEQ ID NO: 3062 - RNA, 21 nt, Artificial
  synthetic
auaggaaugcuaacaguucaa

SEQ ID NO: 3063 - RNA, 21 nt, Artificial
  synthetic
uaggaaugcuaacaguucaca

SEQ ID NO: 3064 - RNA, 21 nt, Artificial
  synthetic
aggaaugcuaacaguucacua

SEQ ID NO: 3065 - RNA, 21 nt, Artificial
  synthetic
ggaaugcuaacaguucacuua

SEQ ID NO: 3066 - RNA, 21 nt, Artificial
  synthetic
gaaugcuaacaguucacuuga

SEQ ID NO: 3067 - RNA, 21 nt, Artificial
  synthetic
gcuaacaguucacuugcagua

SEQ ID NO: 3068 - RNA, 21 nt, Artificial
  synthetic
caguucacuugcaguggaaga

SEQ ID NO: 3069 - RNA, 21 nt, Artificial
  synthetic
gaccgaguagaggcauuuaga

SEQ ID NO: 3070 - RNA, 21 nt, Artificial
  synthetic
accgaguagaggcauuuagga

SEQ ID NO: 3071 - RNA, 21 nt, Artificial
  synthetic
ggcuauuccauaauuccauaa

SEQ ID NO: 3072 - RNA, 21 nt, Artificial
  synthetic
ugccgaaacuggaaguuauua

SEQ ID NO: 3073 - RNA, 21 nt, Artificial
  synthetic
ccgaaacuggaaguuauuuaa

SEQ ID NO: 3074 - RNA, 21 nt, Artificial
  synthetic
cgaaacuggaaguuauuuaua

SEQ ID NO: 3075 - RNA, 21 nt, Artificial
  synthetic
gaaacuggaaguuauuuauua

SEQ ID NO: 3076 - RNA, 21 nt, Artificial
  synthetic
aaacuggaaguuauuuauuua

SEQ ID NO: 3077 - RNA, 21 nt, Artificial
  synthetic
uaauaacccuugaaagucaua

SEQ ID NO: 3078 - RNA, 21 nt, Artificial
  synthetic
aauaacccuugaaagucauga

SEQ ID NO: 3079 - RNA, 21 nt, Artificial
  synthetic
aacccuugaaagucaugaaca

SEQ ID NO: 3080 - RNA, 21 nt, Artificial
  synthetic
cuugaaagucaugaacacaua

SEQ ID NO: 3081 - RNA, 21 nt, Artificial
  synthetic
agucaugaacacaucagcuaa

SEQ ID NO: 3082 - RNA, 21 nt, Artificial
  synthetic
gucaugaacacaucagcuaga

SEQ ID NO: 3083 - RNA, 21 nt, Artificial
  synthetic
ucaugaacacaucagcuagca

SEQ ID NO: 3084 - RNA, 21 nt, Artificial
  synthetic
caugaacacaucagcuagcaa

SEQ ID NO: 3085 - RNA, 21 nt, Artificial
  synthetic
caugaacacaucagcuagcaa

SEQ ID NO: 3086 - RNA, 21 nt, Artificial
  synthetic
augaacacaucagcuagcaaa

SEQ ID NO: 3087 - RNA, 21 nt, Artificial
  synthetic
ugaacacaucagcuagcaaaa

SEQ ID NO: 3088 - RNA, 21 nt, Artificial
  synthetic
gaacacaucagcuagcaaaaa

SEQ ID NO: 3089 - RNA, 21 nt, Artificial
  synthetic
aacacaucagcuagcaaaaga

SEQ ID NO: 3090 - RNA, 21 nt, Artificial
  synthetic
caucagcuagcaaaagaagua

SEQ ID NO: 3091 - RNA, 21 nt, Artificial
  synthetic
cuagcaaaagaaguaacaaga

SEQ ID NO: 3092 - RNA, 21 nt, Artificial
  synthetic
guaacaagagugauucuugca

SEQ ID NO: 3093 - RNA, 21 nt, Artificial
  synthetic
uaacaagagugauucuugcua

SEQ ID NO: 3094 - RNA, 21 nt, Artificial
  synthetic
aacaagagugauucuugcuga

SEQ ID NO: 3095 - RNA, 21 nt, Artificial
  synthetic
agagugauucuugcugcuaua

SEQ ID NO: 3096 - RNA, 21 nt, Artificial
  synthetic
gagugauucuugcugcuauua

SEQ ID NO: 3097 - RNA, 21 nt, Artificial
  synthetic
gugauucuugcugcuauuaca

SEQ ID NO: 3098 - RNA, 21 nt, Artificial
  synthetic
uuggaacgcccuuuuacuaaa

SEQ ID NO: 3099 - RNA, 21 nt, Artificial
  synthetic
uggaacgcccuuuuacuaaaa

SEQ ID NO: 3100 - RNA, 21 nt, Artificial
  synthetic
gaacgcccuuuuacuaaacua

SEQ ID NO: 3101 - RNA, 21 nt, Artificial
  synthetic
aacgcccuuuuacuaaacuua

SEQ ID NO: 3102 - RNA, 21 nt, Artificial
  synthetic
acgcccuuuuacuaaacuuga

SEQ ID NO: 3103 - RNA, 21 nt, Artificial
  synthetic
cgcccuuuuacuaaacuugaa

SEQ ID NO: 3104 - RNA, 21 nt, Artificial
  synthetic
guuucaguaaauucuuaccga

SEQ ID NO: 3105 - RNA, 21 nt, Artificial
  synthetic
uuucaguaaauucuuaccgua

SEQ ID NO: 3106 - RNA, 21 nt, Artificial
  synthetic
uucaguaaauucuuaccguca

SEQ ID NO: 3107 - RNA, 21 nt, Artificial
  synthetic
ucaguaaauucuuaccgucaa

SEQ ID NO: 3108 - RNA, 21 nt, Artificial
  synthetic
caguaaauucuuaccgucaaa

SEQ ID NO: 3109 - RNA, 21 nt, Artificial
  synthetic
aguaaauucuuaccgucaaaa

SEQ ID NO: 3110 - RNA, 21 nt, Artificial
  synthetic
guaaauucuuaccgucaaaca

SEQ ID NO: 3111 - RNA, 21 nt, Artificial
  synthetic
uaaauucuuaccgucaaacua

SEQ ID NO: 3112 - RNA, 21 nt, Artificial
  synthetic
aaauucuuaccgucaaacuga

SEQ ID NO: 3113 - RNA, 21 nt, Artificial
  synthetic
aauucuuaccgucaaacugaa

SEQ ID NO: 3114 - RNA, 21 nt, Artificial
  synthetic
auucuuaccgucaaacugaca

SEQ ID NO: 3115 - RNA, 21 nt, Artificial
  synthetic
uucuuaccgucaaacugacga

SEQ ID NO: 3116 - RNA, 21 nt, Artificial
  synthetic
ucuuaccgucaaacugacgga

SEQ ID NO: 3117 - RNA, 21 nt, Artificial
  synthetic
cuuaccgucaaacugacggaa

SEQ ID NO: 3118 - RNA, 21 nt, Artificial
  synthetic
uuaccgucaaacugacggaua

SEQ ID NO: 3119 - RNA, 21 nt, Artificial
  synthetic
uaccgucaaacugacggauua

SEQ ID NO: 3120 - RNA, 21 nt, Artificial
  synthetic
uaccgucaaacugacggauua

SEQ ID NO: 3121 - RNA, 21 nt, Artificial
  synthetic
accgucaaacugacggauuaa

SEQ ID NO: 3122 - RNA, 21 nt, Artificial
  synthetic
aacugacggauuauuauuuaa

SEQ ID NO: 3123 - RNA, 21 nt, Artificial
  synthetic
aguuugaugaggugaucacua

SEQ ID NO: 3124 - RNA, 21 nt, Artificial
  synthetic
acugucuacagugguucaaca

SEQ ID NO: 3125 - RNA, 21 nt, Artificial
  synthetic
cugucuacagugguucaacua

SEQ ID NO: 3126 - RNA, 21 nt, Artificial
  synthetic
cuacagugguucaacuuuuaa

SEQ ID NO: 3127 - RNA, 21 nt, Artificial
  synthetic
uacagugguucaacuuuuaaa

SEQ ID NO: 3128 - RNA, 21 nt, Artificial
  synthetic
ucaacuuuuaaguuaagggaa

SEQ ID NO: 3129 - RNA, 21 nt, Artificial
  synthetic
aacuuuuaaguuaagggaaaa

SEQ ID NO: 3130 - RNA, 21 nt, Artificial
  synthetic
aaaaacuuuuacuuuguagaa

SEQ ID NO: 3131 - RNA, 21 nt, Artificial
  synthetic
cucagucuacgauuucuuuua

SEQ ID NO: 3132 - RNA, 21 nt, Artificial
  synthetic
ucagucuacgauuucuuuuga

SEQ ID NO: 3133 - RNA, 21 nt, Artificial
  synthetic
cagucuacgauuucuuuugaa

SEQ ID NO: 3134 - RNA, 21 nt, Artificial
  synthetic
caugagaaaaguacagaauca

SEQ ID NO: 3135 - RNA, 21 nt, Artificial
  synthetic
caugagaaaaguacagaauca

SEQ ID NO: 3136 - RNA, 21 nt, Artificial
  synthetic
aaauguucagacuuuguugua

SEQ ID NO: 3137 - RNA, 21 nt, Artificial
  synthetic
ugcuaucagugcuaaagugaa

SEQ ID NO: 3138 - RNA, 21 nt, Artificial
  synthetic
cguaugauagcaguuuaucua

SEQ ID NO: 3139 - RNA, 21 nt, Artificial
  synthetic
guaugauagcaguuuaucuua

SEQ ID NO: 3140 - RNA, 21 nt, Artificial
  synthetic
gauaacucagaagaauuuuua

SEQ ID NO: 3141 - RNA, 21 nt, Artificial
  synthetic
auccacuucucacacuucaga

SEQ ID NO: 3142 - RNA, 21 nt, Artificial
  synthetic
ucucacacuucagauuucaaa

SEQ ID NO: 3143 - RNA, 21 nt, Artificial
  synthetic
cucuacuaugccuaaacgcaa

SEQ ID NO: 3144 - RNA, 21 nt, Artificial
  synthetic
ucuacuaugccuaaacgcaua

SEQ ID NO: 3145 - RNA, 21 nt, Artificial
  synthetic
ucgaaaucacagaguuucuga

SEQ ID NO: 3146 - RNA, 21 nt, Artificial
  synthetic
cgaaaucacagaguuucugca

SEQ ID NO: 3147 - RNA, 21 nt, Artificial
  synthetic
guucuacuucugaaucuauga

SEQ ID NO: 3148 - RNA, 21 nt, Artificial
  synthetic
uucuacuucugaaucuaugga

SEQ ID NO: 3149 - RNA, 21 nt, Artificial
  synthetic
ucuacuucugaaucuauggaa

SEQ ID NO: 3150 - RNA, 21 nt, Artificial
  synthetic
cuacuucugaaucuauggaua

SEQ ID NO: 3151 - RNA, 21 nt, Artificial
  synthetic
ugaaucuauggaucaacuaca

SEQ ID NO: 3152 - RNA, 21 nt, Artificial
  synthetic
ugaaucuauggaucaacuaca

SEQ ID NO: 3153 - RNA, 21 nt, Artificial
  synthetic
acuacuaaacaaaaauagaga

SEQ ID NO: 3154 - RNA, 21 nt, Artificial
  synthetic
accaagugcuaaggauucuua

SEQ ID NO: 3155 - RNA, 21 nt, Artificial
  synthetic
uuaggaaaucaacauugaaua

SEQ ID NO: 3156 - RNA, 21 nt, Artificial
  synthetic
agccaacuccaguuuauacua

SEQ ID NO: 3157 - RNA, 21 nt, Artificial
  synthetic
uucuucagcaacucaguacga

SEQ ID NO: 3158 - RNA, 21 nt, Artificial
  synthetic
uuucuacuuugccauuuccaa

SEQ ID NO: 3159 - RNA, 21 nt, Artificial
  synthetic
uucuacuuugccauuuccaca

SEQ ID NO: 3160 - RNA, 21 nt, Artificial
  synthetic
ucuuguaacauccaauaggaa

SEQ ID NO: 3161 - RNA, 21 nt, Artificial
  synthetic
ccgaaacuggaaguuauuuaa

SEQ ID NO: 3162 - RNA, 21 nt, Artificial
  synthetic
ccgaaacuggaaguuauuuaa

SEQ ID NO: 3163 - RNA, 21 nt, Artificial
  synthetic
ccgaaacuggaaguuauuuaa

SEQ ID NO: 3164 - RNA, 21 nt, Artificial
  synthetic
aaacuggaaguuauuuauuua

SEQ ID NO: 3165 - RNA, 21 nt, Artificial
  synthetic
cuugaaagucaugaacacaua

SEQ ID NO: 3166 - RNA, 21 nt, Artificial
  synthetic
cuugaaagucaugaacacaua

SEQ ID NO: 3167 - RNA, 21 nt, Artificial
  synthetic
agucaugaacacaucagcuaa

SEQ ID NO: 3168 - RNA, 21 nt, Artificial
  synthetic
agucaugaacacaucagcuaa

SEQ ID NO: 3169 - RNA, 21 nt, Artificial
  synthetic
agucaugaacacaucagcuaa

SEQ ID NO: 3170 - RNA, 21 nt, Artificial
  synthetic
gucaugaacacaucagcuaga

SEQ ID NO: 3171 - RNA, 21 nt, Artificial
  synthetic
gucaugaacacaucagcuaga

SEQ ID NO: 3172 - RNA, 21 nt, Artificial
  synthetic
caugaacacaucagcuagcaa

SEQ ID NO: 3173 - RNA, 21 nt, Artificial
  synthetic
agagugauucuugcugcuaua

SEQ ID NO: 3174 - RNA, 21 nt, Artificial
  synthetic
agagugauucuugcugcuaua

SEQ ID NO: 3175 - RNA, 21 nt, Artificial
  synthetic
gugauucuugcugcuauuaca

SEQ ID NO: 3176 - RNA, 21 nt, Artificial
  synthetic
gugauucuugcugcuauuaca

SEQ ID NO: 3177 - RNA, 21 nt, Artificial
  synthetic
cgcccuuuuacuaaacuugaa

SEQ ID NO: 3178 - RNA, 21 nt, Artificial
  synthetic
cgcccuuuuacuaaacuugaa

SEQ ID NO: 3179 - RNA, 21 nt, Artificial
  synthetic
uaccgucaaacugacggauua

SEQ ID NO: 3180 - RNA, 21 nt, Artificial
  synthetic
acugucuacagugguucaaca

SEQ ID NO: 3181 - RNA, 21 nt, Artificial
  synthetic
acugucuacagugguucaaca

SEQ ID NO: 3182 - RNA, 21 nt, Artificial
  synthetic
agugguucaacuuuuaaguua

SEQ ID NO: 3183 - RNA, 21 nt, Artificial
  synthetic
gugguucaacuuuuaaguuaa

SEQ ID NO: 3184 - RNA, 21 nt, Artificial
  synthetic
uaagggaaaaacuuuuacuua

SEQ ID NO: 3185 - RNA, 21 nt, Artificial
  synthetic
ccucagccuacgauuucuuua

SEQ ID NO: 3186 - RNA, 21 nt, Artificial
  synthetic
cucagccuacgauuucuuuua

SEQ ID NO: 3187 - RNA, 21 nt, Artificial
  synthetic
ucagccuacgauuucuuuuga

SEQ ID NO: 3188 - RNA, 21 nt, Artificial
  synthetic
gaggaugguucauauacuuaa

SEQ ID NO: 3189 - RNA, 21 nt, Artificial
  synthetic
gaggaugguucauauacuuaa

SEQ ID NO: 3190 - RNA, 21 nt, Artificial
  synthetic
aggaugguucauauacuuaca

SEQ ID NO: 3191 - RNA, 21 nt, Artificial
  synthetic
aaugugaaguacaagugaaaa

SEQ ID NO: 3192 - RNA, 21 nt, Artificial
  synthetic
aaugugaaguacaagugaaaa

SEQ ID NO: 3193 - RNA, 21 nt, Artificial
  synthetic
gugaaguacaagugaaaaaca

SEQ ID NO: 3194 - RNA, 21 nt, Artificial
  synthetic
aaggaguuuuuaaaacauaca

SEQ ID NO: 3195 - RNA, 21 nt, Artificial
  synthetic
aggaguuuuuaaaacauacaa

SEQ ID NO: 3196 - RNA, 21 nt, Artificial
  synthetic
aaacauacaguccuaagugua

SEQ ID NO: 3197 - RNA, 21 nt, Artificial
  synthetic
aacauacaguccuaaguguga

SEQ ID NO: 3198 - RNA, 21 nt, Artificial
  synthetic
acauacaguccuaagugugaa

SEQ ID NO: 3199 - RNA, 21 nt, Artificial
  synthetic
gcugcacaugagaaaaguaca

SEQ ID NO: 3200 - RNA, 21 nt, Artificial
  synthetic
cugcacaugagaaaaguacaa

SEQ ID NO: 3201 - RNA, 21 nt, Artificial
  synthetic
auggagaguguuuuguucaaa

SEQ ID NO: 3202 - RNA, 21 nt, Artificial
  synthetic
ggagaguguuuuguucaaaua

SEQ ID NO: 3203 - RNA, 21 nt, Artificial
  synthetic
uuuguucaaaugcucagacua

SEQ ID NO: 3204 - RNA, 21 nt, Artificial
  synthetic
uguucaaaugcucagacuuca

SEQ ID NO: 3205 - RNA, 21 nt, Artificial
  synthetic
guucaaaugcucagacuucga

SEQ ID NO: 3206 - RNA, 21 nt, Artificial
  synthetic
uucaaaugcucagacuucgua

SEQ ID NO: 3207 - RNA, 21 nt, Artificial
  synthetic
ucaaaugcucagacuucguua

SEQ ID NO: 3208 - RNA, 21 nt, Artificial
  synthetic
caaaugcucagacuucguuga

SEQ ID NO: 3209 - RNA, 21 nt, Artificial
  synthetic
aaaugcucagacuucguugua

SEQ ID NO: 3210 - RNA, 21 nt, Artificial
  synthetic
aaugcucagacuucguuguga

SEQ ID NO: 3211 - RNA, 21 nt, Artificial
  synthetic
acauguuucgauauaaugaaa

SEQ ID NO: 3212 - RNA, 21 nt, Artificial
  synthetic
uuuaucuucauauacgguuca

SEQ ID NO: 3213 - RNA, 21 nt, Artificial
  synthetic
agggacaacucagaagaauua

SEQ ID NO: 3214 - RNA, 21 nt, Artificial
  synthetic
gggacaacucagaagaauuua

SEQ ID NO: 3215 - RNA, 21 nt, Artificial
  synthetic
ggacaacucagaagaauuuca

SEQ ID NO: 3216 - RNA, 21 nt, Artificial
  synthetic
gacaacucagaagaauuucua

SEQ ID NO: 3217 - RNA, 21 nt, Artificial
  synthetic
ugcuucucacacuucagauua

SEQ ID NO: 3218 - RNA, 21 nt, Artificial
  synthetic
gcuucucacacuucagauuua

SEQ ID NO: 3219 - RNA, 21 nt, Artificial
  synthetic
cuucucacacuucagauuuca

SEQ ID NO: 3220 - RNA, 21 nt, Artificial
  synthetic
cuucucacacuucagauuuca

SEQ ID NO: 3221 - RNA, 21 nt, Artificial
  synthetic
uucucacacuucagauuucaa

SEQ ID NO: 3222 - RNA, 21 nt, Artificial
  synthetic
uucucacacuucagauuucaa

SEQ ID NO: 3223 - RNA, 21 nt, Artificial
  synthetic
ucagaccaaagaguaguuaaa

SEQ ID NO: 3224 - RNA, 21 nt, Artificial
  synthetic
ucagaccaaagaguaguuaaa

SEQ ID NO: 3225 - RNA, 21 nt, Artificial
  synthetic
cagaccaaagaguaguuaaua

SEQ ID NO: 3226 - RNA, 21 nt, Artificial
  synthetic
cagaccaaagaguaguuaaua

SEQ ID NO: 3227 - RNA, 21 nt, Artificial
  synthetic
uagaauuuguaucccacaaua

SEQ ID NO: 3228 - RNA, 21 nt, Artificial
  synthetic
agaauuuguaucccacaauca

SEQ ID NO: 3229 - RNA, 21 nt, Artificial
  synthetic
gaauuuguaucccacaaucca

SEQ ID NO: 3230 - RNA, 21 nt, Artificial
  synthetic
gugaaacaucaccuagcuuua

SEQ ID NO: 3231 - RNA, 21 nt, Artificial
  synthetic
ugaaacaucaccuagcuuuua

SEQ ID NO: 3232 - RNA, 21 nt, Artificial
  synthetic
gaaacaucaccuagcuuuuca

SEQ ID NO: 3233 - RNA, 21 nt, Artificial
  synthetic
aaacaucaccuagcuuuucaa

SEQ ID NO: 3234 - RNA, 21 nt, Artificial
  synthetic
aacaucaccuagcuuuucaaa

SEQ ID NO: 3235 - RNA, 21 nt, Artificial
  synthetic
acaucaccuagcuuuucaaaa

SEQ ID NO: 3236 - RNA, 21 nt, Artificial
  synthetic
caucaccuagcuuuucaaaaa

SEQ ID NO: 3237 - RNA, 21 nt, Artificial
  synthetic
aucaccuagcuuuucaaaaga

SEQ ID NO: 3238 - RNA, 21 nt, Artificial
  synthetic
ucaccuagcuuuucaaaagca

SEQ ID NO: 3239 - RNA, 21 nt, Artificial
  synthetic
caccuagcuuuucaaaagcua

SEQ ID NO: 3240 - RNA, 21 nt, Artificial
  synthetic
accuagcuuuucaaaagcuga

SEQ ID NO: 3241 - RNA, 21 nt, Artificial
  synthetic
ccuagcuuuucaaaagcugaa

SEQ ID NO: 3242 - RNA, 21 nt, Artificial
  synthetic
caucugaaucuauggaucaaa

SEQ ID NO: 3243 - RNA, 21 nt, Artificial
  synthetic
aucugaaucuauggaucaaca

SEQ ID NO: 3244 - RNA, 21 nt, Artificial
  synthetic
ucugaaucuauggaucaacua

SEQ ID NO: 3245 - RNA, 21 nt, Artificial
  synthetic
ucugaaucuauggaucaacua

SEQ ID NO: 3246 - RNA, 21 nt, Artificial
  synthetic
cugaaucuauggaucaacuaa

SEQ ID NO: 3247 - RNA, 21 nt, Artificial
  synthetic
cugaaucuauggaucaacuaa

SEQ ID NO: 3248 - RNA, 21 nt, Artificial
  synthetic
aucuauggaucaacuacuaaa

SEQ ID NO: 3249 - RNA, 21 nt, Artificial
  synthetic
ucuauggaucaacuacuaaga

SEQ ID NO: 3250 - RNA, 21 nt, Artificial
  synthetic
cuauggaucaacuacuaagca

SEQ ID NO: 3251 - RNA, 21 nt, Artificial
  synthetic
uauggaucaacuacuaagcaa

SEQ ID NO: 3252 - RNA, 21 nt, Artificial
  synthetic
auggaucaacuacuaagcaaa

SEQ ID NO: 3253 - RNA, 21 nt, Artificial
  synthetic
uggaucaacuacuaagcaaaa

SEQ ID NO: 3254 - RNA, 21 nt, Artificial
  synthetic
ggaucaacuacuaagcaaaaa

SEQ ID NO: 3255 - RNA, 21 nt, Artificial
  synthetic
gaucaacuacuaagcaaaaaa

SEQ ID NO: 3256 - RNA, 21 nt, Artificial
  synthetic
aaggagaaaagucacgagaua

SEQ ID NO: 3257 - RNA, 21 nt, Artificial
  synthetic
ggaguucaacccucguucuua

SEQ ID NO: 3258 - RNA, 21 nt, Artificial
  synthetic
guucaacccucguucuuucua

SEQ ID NO: 3259 - RNA, 21 nt, Artificial
  synthetic
uucaacccucguucuuucuca

SEQ ID NO: 3260 - RNA, 21 nt, Artificial
  synthetic
ucaacccucguucuuucucua

SEQ ID NO: 3261 - RNA, 21 nt, Artificial
  synthetic
caacccucguucuuucucuca

SEQ ID NO: 3262 - RNA, 21 nt, Artificial
  synthetic
aacccucguucuuucucucaa

SEQ ID NO: 3263 - RNA, 21 nt, Artificial
  synthetic
cguucuuucucucagccaaaa

SEQ ID NO: 3264 - RNA, 21 nt, Artificial
  synthetic
guucuuucucucagccaaaga

SEQ ID NO: 3265 - RNA, 21 nt, Artificial
  synthetic
aguccugucauacaagguaaa

SEQ ID NO: 3266 - RNA, 21 nt, Artificial
  synthetic
guccugucauacaagguaaua

SEQ ID NO: 3267 - RNA, 21 nt, Artificial
  synthetic
ugucauacaagguaaugccaa

SEQ ID NO: 3268 - RNA, 21 nt, Artificial
  synthetic
gucauacaagguaaugccaga

SEQ ID NO: 3269 - RNA, 21 nt, Artificial
  synthetic
ucuacuuugccauuuccacca

SEQ ID NO: 3270 - RNA, 21 nt, Artificial
  synthetic
aagcacagaaaacuagaacua

SEQ ID NO: 3271 - RNA, 21 nt, Artificial
  synthetic
gcacagaaaacuagaacuuca

SEQ ID NO: 3272 - RNA, 21 nt, Artificial
  synthetic
acagaaaacuagaacuucaua

SEQ ID NO: 3273 - RNA, 21 nt, Artificial
  synthetic
cagaaaacuagaacuucauua

SEQ ID NO: 3274 - RNA, 21 nt, Artificial
  synthetic
ugcuugcugaaacuggaagua

SEQ ID NO: 3275 - RNA, 21 nt, Artificial
  synthetic
cugaaacuggaaguuauuuaa

SEQ ID NO: 3276 - RNA, 21 nt, Artificial
  synthetic
ugaaacuggaaguuauuuaua

SEQ ID NO: 3277 - RNA, 21 nt, Artificial
  synthetic
gaaacuggaaguuauuuauua

SEQ ID NO: 3278 - RNA, 21 nt, Artificial
  synthetic
gaaacuggaaguuauuuauua

SEQ ID NO: 3279 - RNA, 21 nt, Artificial
  synthetic
uugagagucaugaacacauca

SEQ ID NO: 3280 - RNA, 21 nt, Artificial
  synthetic
agucaugaacacaucagcuaa

SEQ ID NO: 3281 - RNA, 21 nt, Artificial
  synthetic
agucaugaacacaucagcuaa

SEQ ID NO: 3282 - RNA, 21 nt, Artificial
  synthetic
gucaugaacacaucagcuaga

SEQ ID NO: 3283 - RNA, 21 nt, Artificial
  synthetic
gucaugaacacaucagcuaga

SEQ ID NO: 3284 - RNA, 21 nt, Artificial
  synthetic
augaacacaucagcuagcaaa

SEQ ID NO: 3285 - RNA, 21 nt, Artificial
  synthetic
ugaacacaucagcuagcaaca

SEQ ID NO: 3286 - RNA, 21 nt, Artificial
  synthetic
aucagcuagcaacagaaguaa

SEQ ID NO: 3287 - RNA, 21 nt, Artificial
  synthetic
cagcuagcaacagaaguaaca

SEQ ID NO: 3288 - RNA, 21 nt, Artificial
  synthetic
cuagcaacagaaguaacaaga

SEQ ID NO: 3289 - RNA, 21 nt, Artificial
  synthetic
uagcaacagaaguaacaagaa

SEQ ID NO: 3290 - RNA, 21 nt, Artificial
  synthetic
agaaguaacaagagugauuca

SEQ ID NO: 3291 - RNA, 21 nt, Artificial
  synthetic
agaaguaacaagagugauuca

SEQ ID NO: 3292 - RNA, 21 nt, Artificial
  synthetic
cuugcugcuauuaccgcuuua

SEQ ID NO: 3293 - RNA, 21 nt, Artificial
  synthetic
gcugcuauuaccgcuuuaaaa

SEQ ID NO: 3294 - RNA, 21 nt, Artificial
  synthetic
cccuuuuacuaaacuugacaa

SEQ ID NO: 3295 - RNA, 21 nt, Artificial
  synthetic
cuuuuacuaaacuugacagaa

SEQ ID NO: 3296 - RNA, 21 nt, Artificial
  synthetic
uuuuacuaaacuugacagaaa

SEQ ID NO: 3297 - RNA, 21 nt, Artificial
  synthetic
uacuaaacuugacagaaguua

SEQ ID NO: 3298 - RNA, 21 nt, Artificial
  synthetic
cuaaacuugacagaaguucaa

SEQ ID NO: 3299 - RNA, 21 nt, Artificial
  synthetic
acuugacagaaguucaguaaa

SEQ ID NO: 3300 - RNA, 21 nt, Artificial
  synthetic
ugacagaaguucaguaaauua

SEQ ID NO: 3301 - RNA, 21 nt, Artificial
  synthetic
acagaaguucaguaaauucua

SEQ ID NO: 3302 - RNA, 21 nt, Artificial
  synthetic
cagaaguucaguaaauucuua

SEQ ID NO: 3303 - RNA, 21 nt, Artificial
  synthetic
agaaguucaguaaauucuuaa

SEQ ID NO: 3304 - RNA, 21 nt, Artificial
  synthetic
ccaaacugacggauuauuaua

SEQ ID NO: 3305 - RNA, 21 nt, Artificial
  synthetic
guuaagggaaaacuuuuacua

SEQ ID NO: 3306 - RNA, 21 nt, Artificial
  synthetic
uuaagggaaaacuuuuacuua

SEQ ID NO: 3307 - RNA, 21 nt, Artificial
  synthetic
uaagggaaaacuuuuacuuua

SEQ ID NO: 3308 - RNA, 21 nt, Artificial
  synthetic
agggaaaacuuuuacuuugua

SEQ ID NO: 3309 - RNA, 21 nt, Artificial
  synthetic
gggaaaacuuuuacuuuguaa

SEQ ID NO: 3310 - RNA, 21 nt, Artificial
  synthetic
gaaaacuuuuacuuuguagaa

SEQ ID NO: 3311 - RNA, 21 nt, Artificial
  synthetic
aaaacuuuuacuuuguagaua

SEQ ID NO: 3312 - RNA, 21 nt, Artificial
  synthetic
aaaacuuuuacuuuguagaua

SEQ ID NO: 3313 - RNA, 23 nt, Artificial
  synthetic
uacucuuuaccggaagucggagg

SEQ ID NO: 3314 - RNA, 23 nt, Artificial
  synthetic
ugacucuuuaccggaagucggag

SEQ ID NO: 3315 - RNA, 23 nt, Artificial
  synthetic
uggacucuuuaccggaagucgga

SEQ ID NO: 3316 - RNA, 23 nt, Artificial
  synthetic
uuuucacuuguacuucacauuug

SEQ ID NO: 3317 - RNA, 23 nt, Artificial
  synthetic
uuuuucacuuguacuucacauuu

SEQ ID NO: 3318 - RNA, 23 nt, Artificial
  synthetic
uauuuuucacuuguacuucacau

SEQ ID NO: 3319 - RNA, 23 nt, Artificial
  synthetic
ugauucuguacuuuucucaugug

SEQ ID NO: 3320 - RNA, 23 nt, Artificial
  synthetic
uaaucugaagugugagaagugga

SEQ ID NO: 3321 - RNA, 23 nt, Artificial
  synthetic
uaaaucugaagugugagaagugg

SEQ ID NO: 3322 - RNA, 23 nt, Artificial
  synthetic
ugaaaucugaagugugagaagug

SEQ ID NO: 3323 - RNA, 23 nt, Artificial
  synthetic
uugaaaucugaagugugagaagu

SEQ ID NO: 3324 - RNA, 23 nt, Artificial
  synthetic
uuugaaaucugaagugugagaag

SEQ ID NO: 3325 - RNA, 23 nt, Artificial
  synthetic
uguugaaaucugaagugugagaa

SEQ ID NO: 3326 - RNA, 23 nt, Artificial
  synthetic
ugguugaaaucugaagugugaga

SEQ ID NO: 3327 - RNA, 23 nt, Artificial
  synthetic
uggguugaaaucugaagugugag

SEQ ID NO: 3328 - RNA, 23 nt, Artificial
  synthetic
uuucggguugaaaucugaagugu

SEQ ID NO: 3329 - RNA, 23 nt, Artificial
  synthetic
uuuaacuacucuuuggucugaac

SEQ ID NO: 3330 - RNA, 23 nt, Artificial
  synthetic
uauuaacuacucuuuggucugaa

SEQ ID NO: 3331 - RNA, 23 nt, Artificial
  synthetic
uugcguuuaggcauaguagagac

SEQ ID NO: 3332 - RNA, 23 nt, Artificial
  synthetic
uaugcguuuaggcauaguagaga

SEQ ID NO: 3333 - RNA, 23 nt, Artificial
  synthetic
uacaugcguuuaggcauaguaga

SEQ ID NO: 3334 - RNA, 23 nt, Artificial
  synthetic
uuugauccauagauucagaagua

SEQ ID NO: 3335 - RNA, 23 nt, Artificial
  synthetic
uguugauccauagauucagaagu

SEQ ID NO: 3336 - RNA, 23 nt, Artificial
  synthetic
uaguugauccauagauucagaag

SEQ ID NO: 3337 - RNA, 23 nt, Artificial
  synthetic
uuaguugauccauagauucagaa

SEQ ID NO: 3338 - RNA, 23 nt, Artificial
  synthetic
uguaguugauccauagauucaga

SEQ ID NO: 3339 - RNA, 23 nt, Artificial
  synthetic
uaguaguugauccauagauucag

SEQ ID NO: 3340 - RNA, 23 nt, Artificial
  synthetic
uuaguaguugauccauagauuca

SEQ ID NO: 3341 - RNA, 23 nt, Artificial
  synthetic
uuuaguaguugauccauagauuc

SEQ ID NO: 3342 - RNA, 23 nt, Artificial
  synthetic
ucgucauagguauuggguauaaa

SEQ ID NO: 3343 - RNA, 23 nt, Artificial
  synthetic
uuugguacugcucuauaugucuu

SEQ ID NO: 3344 - RNA, 23 nt, Artificial
  synthetic
uuauuugguacugcucuauaugu

SEQ ID NO: 3345 - RNA, 23 nt, Artificial
  synthetic
uauauuugguacugcucuauaug

SEQ ID NO: 3346 - RNA, 23 nt, Artificial
  synthetic
ucauauuugguacugcucuauau

SEQ ID NO: 3347 - RNA, 23 nt, Artificial
  synthetic
uggcauauuugguacugcucuau

SEQ ID NO: 3348 - RNA, 23 nt, Artificial
  synthetic
uuuguaugguaauuugggacaug

SEQ ID NO: 3349 - RNA, 23 nt, Artificial
  synthetic
uuguuguaugguaauuugggaca

SEQ ID NO: 3350 - RNA, 23 nt, Artificial
  synthetic
ucaaaguagaaagaagggcuugu

SEQ ID NO: 3351 - RNA, 23 nt, Artificial
  synthetic
uuggcaaaguagaaagaagggcu

SEQ ID NO: 3352 - RNA, 23 nt, Artificial
  synthetic
uauggcaaaguagaaagaagggc

SEQ ID NO: 3353 - RNA, 23 nt, Artificial
  synthetic
uaauggcaaaguagaaagaaggg

SEQ ID NO: 3354 - RNA, 23 nt, Artificial
  synthetic
uaaauggcaaaguagaaagaagg

SEQ ID NO: 3355 - RNA, 23 nt, Artificial
  synthetic
ugaaauggcaaaguagaaagaag

SEQ ID NO: 3356 - RNA, 23 nt, Artificial
  synthetic
uggaaauggcaaaguagaaagaa

SEQ ID NO: 3357 - RNA, 23 nt, Artificial
  synthetic
uuggaaauggcaaaguagaaaga

SEQ ID NO: 3358 - RNA, 23 nt, Artificial
  synthetic
uguggaaauggcaaaguagaaag

SEQ ID NO: 3359 - RNA, 23 nt, Artificial
  synthetic
uaccauuccugacuguacaugag

SEQ ID NO: 3360 - RNA, 23 nt, Artificial
  synthetic
uaaccauuccugacuguacauga

SEQ ID NO: 3361 - RNA, 23 nt, Artificial
  synthetic
ugaaccauuccugacuguacaug

SEQ ID NO: 3362 - RNA, 23 nt, Artificial
  synthetic
uaugagaaggaaccauuccugac

SEQ ID NO: 3363 - RNA, 23 nt, Artificial
  synthetic
uuggaugagaaggaaccauuccu

SEQ ID NO: 3364 - RNA, 23 nt, Artificial
  synthetic
uguuggaugagaaggaaccauuc

SEQ ID NO: 3365 - RNA, 23 nt, Artificial
  synthetic
uaguuggaugagaaggaaccauu

SEQ ID NO: 3366 - RNA, 23 nt, Artificial
  synthetic
ugcaguuggaugagaaggaacca

SEQ ID NO: 3367 - RNA, 23 nt, Artificial
  synthetic
uauuagcaucauuggcgcauggg

SEQ ID NO: 3368 - RNA, 23 nt, Artificial
  synthetic
ugucauuagcaucauuggcgcau

SEQ ID NO: 3369 - RNA, 23 nt, Artificial
  synthetic
uucgucauuagcaucauuggcgc

SEQ ID NO: 3370 - RNA, 23 nt, Artificial
  synthetic
ugucgucauuagcaucauuggcg

SEQ ID NO: 3371 - RNA, 23 nt, Artificial
  synthetic
uugugucgucauuagcaucauug

SEQ ID NO: 3372 - RNA, 23 nt, Artificial
  synthetic
ucugugucgucauuagcaucauu

SEQ ID NO: 3373 - RNA, 23 nt, Artificial
  synthetic
ugcuguagugcacuuugagcgag

SEQ ID NO: 3374 - RNA, 23 nt, Artificial
  synthetic
uugucgagacuggaaugggcugu

SEQ ID NO: 3375 - RNA, 23 nt, Artificial
  synthetic
uguugucgagacuggaaugggcu

SEQ ID NO: 3376 - RNA, 23 nt, Artificial
  synthetic
uuacaacugcuguuggugguggg

SEQ ID NO: 3377 - RNA, 23 nt, Artificial
  synthetic
uuuacaacugcuguugguggugg

SEQ ID NO: 3378 - RNA, 23 nt, Artificial
  synthetic
ucuuacaacugcuguugguggug

SEQ ID NO: 3379 - RNA, 23 nt, Artificial
  synthetic
ugccuuacaacugcuguuggugg

SEQ ID NO: 3380 - RNA, 23 nt, Artificial
  synthetic
ucagccuuacaacugcuguuggu

SEQ ID NO: 3381 - RNA, 23 nt, Artificial
  synthetic
uguugguagaagcaguagaaggg

SEQ ID NO: 3382 - RNA, 23 nt, Artificial
  synthetic
ucaguugguagaagcaguagaag

SEQ ID NO: 3383 - RNA, 23 nt, Artificial
  synthetic
uccaguugguagaagcaguagaa

SEQ ID NO: 3384 - RNA, 23 nt, Artificial
  synthetic
ucuuccaguugguagaagcagua

SEQ ID NO: 3385 - RNA, 23 nt, Artificial
  synthetic
uguuuucugugcuuccaguuggu

SEQ ID NO: 3386 - RNA, 23 nt, Artificial
  synthetic
uuggauguuacaagaaaucaaca

SEQ ID NO: 3387 - RNA, 23 nt, Artificial
  synthetic
uuauuggauguuacaagaaauca

SEQ ID NO: 3388 - RNA, 23 nt, Artificial
  synthetic
uccuauuggauguuacaagaaau

SEQ ID NO: 3389 - RNA, 23 nt, Artificial
  synthetic
uuccuauuggauguuacaagaaa

SEQ ID NO: 3390 - RNA, 23 nt, Artificial
  synthetic
ucauuccuauuggauguuacaag

SEQ ID NO: 3391 - RNA, 23 nt, Artificial
  synthetic
uagcauuccuauuggauguuaca

SEQ ID NO: 3392 - RNA, 23 nt, Artificial
  synthetic
uuagcauuccuauuggauguuac

SEQ ID NO: 3393 - RNA, 23 nt, Artificial
  synthetic
uuuagcauuccuauuggauguua

SEQ ID NO: 3394 - RNA, 23 nt, Artificial
  synthetic
uguuagcauuccuauuggauguu

SEQ ID NO: 3395 - RNA, 23 nt, Artificial
  synthetic
ugaacuguuagcauuccuauugg

SEQ ID NO: 3396 - RNA, 23 nt, Artificial
  synthetic
uugaacuguuagcauuccuauug

SEQ ID NO: 3397 - RNA, 23 nt, Artificial
  synthetic
ugugaacuguuagcauuccuauu

SEQ ID NO: 3398 - RNA, 23 nt, Artificial
  synthetic
uagugaacuguuagcauuccuau

SEQ ID NO: 3399 - RNA, 23 nt, Artificial
  synthetic
uaagugaacuguuagcauuccua

SEQ ID NO: 3400 - RNA, 23 nt, Artificial
  synthetic
ucaagugaacuguuagcauuccu

SEQ ID NO: 3401 - RNA, 23 nt, Artificial
  synthetic
uacugcaagugaacuguuagcau

SEQ ID NO: 3402 - RNA, 23 nt, Artificial
  synthetic
ucuuccacugcaagugaacuguu

SEQ ID NO: 3403 - RNA, 23 nt, Artificial
  synthetic
ucuaaaugccucuacucggucca

SEQ ID NO: 3404 - RNA, 23 nt, Artificial
  synthetic
uccuaaaugccucuacucggucc

SEQ ID NO: 3405 - RNA, 23 nt, Artificial
  synthetic
uuauggaauuauggaauagcccc

SEQ ID NO: 3406 - RNA, 23 nt, Artificial
  synthetic
uaauaacuuccaguuucggcaag

SEQ ID NO: 3407 - RNA, 23 nt, Artificial
  synthetic
uuaaauaacuuccaguuucggca

SEQ ID NO: 3408 - RNA, 23 nt, Artificial
  synthetic
uauaaauaacuuccaguuucggc

SEQ ID NO: 3409 - RNA, 23 nt, Artificial
  synthetic
uaauaaauaacuuccaguuucgg

SEQ ID NO: 3410 - RNA, 23 nt, Artificial
  synthetic
uaaauaaauaacuuccaguuucg

SEQ ID NO: 3411 - RNA, 23 nt, Artificial
  synthetic
uaugacuuucaaggguuauuaaa

SEQ ID NO: 3412 - RNA, 23 nt, Artificial
  synthetic
ucaugacuuucaaggguuauuaa

SEQ ID NO: 3413 - RNA, 23 nt, Artificial
  synthetic
uguucaugacuuucaaggguuau

SEQ ID NO: 3414 - RNA, 23 nt, Artificial
  synthetic
uauguguucaugacuuucaaggg

SEQ ID NO: 3415 - RNA, 23 nt, Artificial
  synthetic
uuagcugauguguucaugacuuu

SEQ ID NO: 3416 - RNA, 23 nt, Artificial
  synthetic
ucuagcugauguguucaugacuu

SEQ ID NO: 3417 - RNA, 23 nt, Artificial
  synthetic
ugcuagcugauguguucaugacu

SEQ ID NO: 3418 - RNA, 23 nt, Artificial
  synthetic
uugcuagcugauguguucaugac

SEQ ID NO: 3419 - RNA, 23 nt, Artificial
  synthetic
uugcuagcugauguguucaugac

SEQ ID NO: 3420 - RNA, 23 nt, Artificial
  synthetic
uuugcuagcugauguguucauga

SEQ ID NO: 3421 - RNA, 23 nt, Artificial
  synthetic
uuuugcuagcugauguguucaug

SEQ ID NO: 3422 - RNA, 23 nt, Artificial
  synthetic
uuuuugcuagcugauguguucau

SEQ ID NO: 3423 - RNA, 23 nt, Artificial
  synthetic
ucuuuugcuagcugauguguuca

SEQ ID NO: 3424 - RNA, 23 nt, Artificial
  synthetic
uacuucuuuugcuagcugaugug

SEQ ID NO: 3425 - RNA, 23 nt, Artificial
  synthetic
ucuuguuacuucuuuugcuagcu

SEQ ID NO: 3426 - RNA, 23 nt, Artificial
  synthetic
ugcaagaaucacucuuguuacuu

SEQ ID NO: 3427 - RNA, 23 nt, Artificial
  synthetic
uagcaagaaucacucuuguuacu

SEQ ID NO: 3428 - RNA, 23 nt, Artificial
  synthetic
ucagcaagaaucacucuuguuac

SEQ ID NO: 3429 - RNA, 23 nt, Artificial
  synthetic
uauagcagcaagaaucacucuug

SEQ ID NO: 3430 - RNA, 23 nt, Artificial
  synthetic
uaauagcagcaagaaucacucuu

SEQ ID NO: 3431 - RNA, 23 nt, Artificial
  synthetic
uguaauagcagcaagaaucacuc

SEQ ID NO: 3432 - RNA, 23 nt, Artificial
  synthetic
uuuaguaaaagggcguuccaagu

SEQ ID NO: 3433 - RNA, 23 nt, Artificial
  synthetic
uuuuaguaaaagggcguuccaag

SEQ ID NO: 3434 - RNA, 23 nt, Artificial
  synthetic
uaguuuaguaaaagggcguucca

SEQ ID NO: 3435 - RNA, 23 nt, Artificial
  synthetic
uaaguuuaguaaaagggcguucc

SEQ ID NO: 3436 - RNA, 23 nt, Artificial
  synthetic
ucaaguuuaguaaaagggcguuc

SEQ ID NO: 3437 - RNA, 23 nt, Artificial
  synthetic
uucaaguuuaguaaaagggcguu

SEQ ID NO: 3438 - RNA, 23 nt, Artificial
  synthetic
ucgguaagaauuuacugaaacuu

SEQ ID NO: 3439 - RNA, 23 nt, Artificial
  synthetic
uacgguaagaauuuacugaaacu

SEQ ID NO: 3440 - RNA, 23 nt, Artificial
  synthetic
ugacgguaagaauuuacugaaac

SEQ ID NO: 3441 - RNA, 23 nt, Artificial
  synthetic
uugacgguaagaauuuacugaaa

SEQ ID NO: 3442 - RNA, 23 nt, Artificial
  synthetic
uuugacgguaagaauuuacugaa

SEQ ID NO: 3443 - RNA, 23 nt, Artificial
  synthetic
uuuugacgguaagaauuuacuga

SEQ ID NO: 3444 - RNA, 23 nt, Artificial
  synthetic
uguuugacgguaagaauuuacug

SEQ ID NO: 3445 - RNA, 23 nt, Artificial
  synthetic
uaguuugacgguaagaauuuacu

SEQ ID NO: 3446 - RNA, 23 nt, Artificial
  synthetic
ucaguuugacgguaagaauuuac

SEQ ID NO: 3447 - RNA, 23 nt, Artificial
  synthetic
uucaguuugacgguaagaauuua

SEQ ID NO: 3448 - RNA, 23 nt, Artificial
  synthetic
ugucaguuugacgguaagaauuu

SEQ ID NO: 3449 - RNA, 23 nt, Artificial
  synthetic
ucgucaguuugacgguaagaauu

SEQ ID NO: 3450 - RNA, 23 nt, Artificial
  synthetic
uccgucaguuugacgguaagaau

SEQ ID NO: 3451 - RNA, 23 nt, Artificial
  synthetic
uuccgucaguuugacgguaagaa

SEQ ID NO: 3452 - RNA, 23 nt, Artificial
  synthetic
uauccgucaguuugacgguaaga

SEQ ID NO: 3453 - RNA, 23 nt, Artificial
  synthetic
uaauccgucaguuugacgguaag

SEQ ID NO: 3454 - RNA, 23 nt, Artificial
  synthetic
uaauccgucaguuugacgguaag

SEQ ID NO: 3455 - RNA, 23 nt, Artificial
  synthetic
uuaauccgucaguuugacgguaa

SEQ ID NO: 3456 - RNA, 23 nt, Artificial
  synthetic
uuaaauaauaauccgucaguuug

SEQ ID NO: 3457 - RNA, 23 nt, Artificial
  synthetic
uagugaucaccucaucaaacuug

SEQ ID NO: 3458 - RNA, 23 nt, Artificial
  synthetic
uguugaaccacuguagacaguga

SEQ ID NO: 3459 - RNA, 23 nt, Artificial
  synthetic
uaguugaaccacuguagacagug

SEQ ID NO: 3460 - RNA, 23 nt, Artificial
  synthetic
uuaaaaguugaaccacuguagac

SEQ ID NO: 3461 - RNA, 23 nt, Artificial
  synthetic
uuuaaaaguugaaccacuguaga

SEQ ID NO: 3462 - RNA, 23 nt, Artificial
  synthetic
uucccuuaacuuaaaaguugaac

SEQ ID NO: 3463 - RNA, 23 nt, Artificial
  synthetic
uuuucccuuaacuuaaaaguuga

SEQ ID NO: 3464 - RNA, 23 nt, Artificial
  synthetic
uucuacaaaguaaaaguuuuucc

SEQ ID NO: 3465 - RNA, 23 nt, Artificial
  synthetic
uaaaagaaaucguagacugaggc

SEQ ID NO: 3466 - RNA, 23 nt, Artificial
  synthetic
ucaaaagaaaucguagacugagg

SEQ ID NO: 3467 - RNA, 23 nt, Artificial
  synthetic
uucaaaagaaaucguagacugag

SEQ ID NO: 3468 - RNA, 23 nt, Artificial
  synthetic
ugauucuguacuuuucucaugug

SEQ ID NO: 3469 - RNA, 23 nt, Artificial
  synthetic
ugauucuguacuuuucucaugug

SEQ ID NO: 3470 - RNA, 23 nt, Artificial
  synthetic
uacaacaaagucugaacauuuga

SEQ ID NO: 3471 - RNA, 23 nt, Artificial
  synthetic
uucacuuuagcacugauagcaga

SEQ ID NO: 3472 - RNA, 23 nt, Artificial
  synthetic
uagauaaacugcuaucauacgua

SEQ ID NO: 3473 - RNA, 23 nt, Artificial
  synthetic
uaagauaaacugcuaucauacgu

SEQ ID NO: 3474 - RNA, 23 nt, Artificial
  synthetic
uaaaaauucuucugaguuaucuc

SEQ ID NO: 3475 - RNA, 23 nt, Artificial
  synthetic
ucugaagugugagaaguggaucu

SEQ ID NO: 3476 - RNA, 23 nt, Artificial
  synthetic
uuugaaaucugaagugugagaag

SEQ ID NO: 3477 - RNA, 23 nt, Artificial
  synthetic
uugcguuuaggcauaguagagac

SEQ ID NO: 3478 - RNA, 23 nt, Artificial
  synthetic
uaugcguuuaggcauaguagaga

SEQ ID NO: 3479 - RNA, 23 nt, Artificial
  synthetic
ucagaaacucugugauuucgagg

SEQ ID NO: 3480 - RNA, 23 nt, Artificial
  synthetic
ugcagaaacucugugauuucgag

SEQ ID NO: 3481 - RNA, 23 nt, Artificial
  synthetic
ucauagauucagaaguagaacuu

SEQ ID NO: 3482 - RNA, 23 nt, Artificial
  synthetic
uccauagauucagaaguagaacu

SEQ ID NO: 3483 - RNA, 23 nt, Artificial
  synthetic
uuccauagauucagaaguagaac

SEQ ID NO: 3484 - RNA, 23 nt, Artificial
  synthetic
uauccauagauucagaaguagaa

SEQ ID NO: 3485 - RNA, 23 nt, Artificial
  synthetic
uguaguugauccauagauucaga

SEQ ID NO: 3486 - RNA, 23 nt, Artificial
  synthetic
uguaguugauccauagauucaga

SEQ ID NO: 3487 - RNA, 23 nt, Artificial
  synthetic
ucucuauuuuuguuuaguaguug

SEQ ID NO: 3488 - RNA, 23 nt, Artificial
  synthetic
uaagaauccuuagcacuugguuc

SEQ ID NO: 3489 - RNA, 23 nt, Artificial
  synthetic
uauucaauguugauuuccuaacu

SEQ ID NO: 3490 - RNA, 23 nt, Artificial
  synthetic
uaguauaaacuggaguuggcugu

SEQ ID NO: 3491 - RNA, 23 nt, Artificial
  synthetic
ucguacugaguugcugaagaaga

SEQ ID NO: 3492 - RNA, 23 nt, Artificial
  synthetic
uuggaaauggcaaaguagaaaga

SEQ ID NO: 3493 - RNA, 23 nt, Artificial
  synthetic
uguggaaauggcaaaguagaaag

SEQ ID NO: 3494 - RNA, 23 nt, Artificial
  synthetic
uuccuauuggauguuacaagaaa

SEQ ID NO: 3495 - RNA, 23 nt, Artificial
  synthetic
uuaaauaacuuccaguuucggca

SEQ ID NO: 3496 - RNA, 23 nt, Artificial
  synthetic
uuaaauaacuuccaguuucggca

SEQ ID NO: 3497 - RNA, 23 nt, Artificial
  synthetic
uuaaauaacuuccaguuucggca

SEQ ID NO: 3498 - RNA, 23 nt, Artificial
  synthetic
uaaauaaauaacuuccaguuucg

SEQ ID NO: 3499 - RNA, 23 nt, Artificial
  synthetic
uauguguucaugacuuucaaggg

SEQ ID NO: 3500 - RNA, 23 nt, Artificial
  synthetic
uauguguucaugacuuucaaggg

SEQ ID NO: 3501 - RNA, 23 nt, Artificial
  synthetic
uuagcugauguguucaugacuuu

SEQ ID NO: 3502 - RNA, 23 nt, Artificial
  synthetic
uuagcugauguguucaugacuuu

SEQ ID NO: 3503 - RNA, 23 nt, Artificial
  synthetic
uuagcugauguguucaugacuuu

SEQ ID NO: 3504 - RNA, 23 nt, Artificial
  synthetic
ucuagcugauguguucaugacuu

SEQ ID NO: 3505 - RNA, 23 nt, Artificial
  synthetic
ucuagcugauguguucaugacuu

SEQ ID NO: 3506 - RNA, 23 nt, Artificial
  synthetic
uugcuagcugauguguucaugac

SEQ ID NO: 3507 - RNA, 23 nt, Artificial
  synthetic
uauagcagcaagaaucacucuug

SEQ ID NO: 3508 - RNA, 23 nt, Artificial
  synthetic
uauagcagcaagaaucacucuug

SEQ ID NO: 3509 - RNA, 23 nt, Artificial
  synthetic
uguaauagcagcaagaaucacuc

SEQ ID NO: 3510 - RNA, 23 nt, Artificial
  synthetic
uguaauagcagcaagaaucacuc

SEQ ID NO: 3511 - RNA, 23 nt, Artificial
  synthetic
uucaaguuuaguaaaagggcguu

SEQ ID NO: 3512 - RNA, 23 nt, Artificial
  synthetic
uucaaguuuaguaaaagggcguu

SEQ ID NO: 3513 - RNA, 23 nt, Artificial
  synthetic
uaauccgucaguuugacgguaag

SEQ ID NO: 3514 - RNA, 23 nt, Artificial
  synthetic
uguugaaccacuguagacaguga

SEQ ID NO: 3515 - RNA, 23 nt, Artificial
  synthetic
uguugaaccacuguagacaguga

SEQ ID NO: 3516 - RNA, 23 nt, Artificial
  synthetic
uaacuuaaaaguugaaccacugu

SEQ ID NO: 3517 - RNA, 23 nt, Artificial
  synthetic
uuaacuuaaaaguugaaccacug

SEQ ID NO: 3518 - RNA, 23 nt, Artificial
  synthetic
uaaguaaaaguuuuucccuuaac

SEQ ID NO: 3519 - RNA, 23 nt, Artificial
  synthetic
uaaagaaaucguaggcugaggca

SEQ ID NO: 3520 - RNA, 23 nt, Artificial
  synthetic
uaaaagaaaucguaggcugaggc

SEQ ID NO: 3521 - RNA, 23 nt, Artificial
  synthetic
ucaaaagaaaucguaggcugagg

SEQ ID NO: 3522 - RNA, 23 nt, Artificial
  synthetic
uuaaguauaugaaccauccucac

SEQ ID NO: 3523 - RNA, 23 nt, Artificial
  synthetic
uuaaguauaugaaccauccucac

SEQ ID NO: 3524 - RNA, 23 nt, Artificial
  synthetic
uguaaguauaugaaccauccuca

SEQ ID NO: 3525 - RNA, 23 nt, Artificial
  synthetic
uuuucacuuguacuucacauuuc

SEQ ID NO: 3526 - RNA, 23 nt, Artificial
  synthetic
uuuucacuuguacuucacauuuc

SEQ ID NO: 3527 - RNA, 23 nt, Artificial
  synthetic
uguuuuucacuuguacuucacau

SEQ ID NO: 3528 - RNA, 23 nt, Artificial
  synthetic
uguauguuuuaaaaacuccuuca

SEQ ID NO: 3529 - RNA, 23 nt, Artificial
  synthetic
uuguauguuuuaaaaacuccuuc

SEQ ID NO: 3530 - RNA, 23 nt, Artificial
  synthetic
uacacuuaggacuguauguuuua

SEQ ID NO: 3531 - RNA, 23 nt, Artificial
  synthetic
ucacacuuaggacuguauguuuu

SEQ ID NO: 3532 - RNA, 23 nt, Artificial
  synthetic
uucacacuuaggacuguauguuu

SEQ ID NO: 3533 - RNA, 23 nt, Artificial
  synthetic
uguacuuuucucaugugcagcau

SEQ ID NO: 3534 - RNA, 23 nt, Artificial
  synthetic
uuguacuuuucucaugugcagca

SEQ ID NO: 3535 - RNA, 23 nt, Artificial
  synthetic
uuugaacaaaacacucuccauua

SEQ ID NO: 3536 - RNA, 23 nt, Artificial
  synthetic
uauuugaacaaaacacucuccau

SEQ ID NO: 3537 - RNA, 23 nt, Artificial
  synthetic
uagucugagcauuugaacaaaac

SEQ ID NO: 3538 - RNA, 23 nt, Artificial
  synthetic
ugaagucugagcauuugaacaaa

SEQ ID NO: 3539 - RNA, 23 nt, Artificial
  synthetic
ucgaagucugagcauuugaacaa

SEQ ID NO: 3540 - RNA, 23 nt, Artificial
  synthetic
uacgaagucugagcauuugaaca

SEQ ID NO: 3541 - RNA, 23 nt, Artificial
  synthetic
uaacgaagucugagcauuugaac

SEQ ID NO: 3542 - RNA, 23 nt, Artificial
  synthetic
ucaacgaagucugagcauuugaa

SEQ ID NO: 3543 - RNA, 23 nt, Artificial
  synthetic
uacaacgaagucugagcauuuga

SEQ ID NO: 3544 - RNA, 23 nt, Artificial
  synthetic
ucacaacgaagucugagcauuug

SEQ ID NO: 3545 - RNA, 23 nt, Artificial
  synthetic
uuucauuauaucgaaacauguca

SEQ ID NO: 3546 - RNA, 23 nt, Artificial
  synthetic
ugaaccguauaugaagauaaacu

SEQ ID NO: 3547 - RNA, 23 nt, Artificial
  synthetic
uaauucuucugaguugucccuuu

SEQ ID NO: 3548 - RNA, 23 nt, Artificial
  synthetic
uaaauucuucugaguugucccuu

SEQ ID NO: 3549 - RNA, 23 nt, Artificial
  synthetic
ugaaauucuucugaguugucccu

SEQ ID NO: 3550 - RNA, 23 nt, Artificial
  synthetic
uagaaauucuucugaguuguccc

SEQ ID NO: 3551 - RNA, 23 nt, Artificial
  synthetic
uaaucugaagugugagaagcagc

SEQ ID NO: 3552 - RNA, 23 nt, Artificial
  synthetic
uaaaucugaagugugagaagcag

SEQ ID NO: 3553 - RNA, 23 nt, Artificial
  synthetic
ugaaaucugaagugugagaagca

SEQ ID NO: 3554 - RNA, 23 nt, Artificial
  synthetic
ugaaaucugaagugugagaagca

SEQ ID NO: 3555 - RNA, 23 nt, Artificial
  synthetic
uugaaaucugaagugugagaagc

SEQ ID NO: 3556 - RNA, 23 nt, Artificial
  synthetic
uugaaaucugaagugugagaagc

SEQ ID NO: 3557 - RNA, 23 nt, Artificial
  synthetic
uuuaacuacucuuuggucugagc

SEQ ID NO: 3558 - RNA, 23 nt, Artificial
  synthetic
uuuaacuacucuuuggucugagc

SEQ ID NO: 3559 - RNA, 23 nt, Artificial
  synthetic
uauuaacuacucuuuggucugag

SEQ ID NO: 3560 - RNA, 23 nt, Artificial
  synthetic
uauuaacuacucuuuggucugag

SEQ ID NO: 3561 - RNA, 23 nt, Artificial
  synthetic
uauugugggauacaaauucuagg

SEQ ID NO: 3562 - RNA, 23 nt, Artificial
  synthetic
ugauugugggauacaaauucuag

SEQ ID NO: 3563 - RNA, 23 nt, Artificial
  synthetic
uggauugugggauacaaauucua

SEQ ID NO: 3564 - RNA, 23 nt, Artificial
  synthetic
uaaagcuaggugauguuucacuu

SEQ ID NO: 3565 - RNA, 23 nt, Artificial
  synthetic
uaaaagcuaggugauguuucacu

SEQ ID NO: 3566 - RNA, 23 nt, Artificial
  synthetic
ugaaaagcuaggugauguuucac

SEQ ID NO: 3567 - RNA, 23 nt, Artificial
  synthetic
uugaaaagcuaggugauguuuca

SEQ ID NO: 3568 - RNA, 23 nt, Artificial
  synthetic
uuugaaaagcuaggugauguuuc

SEQ ID NO: 3569 - RNA, 23 nt, Artificial
  synthetic
uuuugaaaagcuaggugauguuu

SEQ ID NO: 3570 - RNA, 23 nt, Artificial
  synthetic
uuuuugaaaagcuaggugauguu

SEQ ID NO: 3571 - RNA, 23 nt, Artificial
  synthetic
ucuuuugaaaagcuaggugaugu

SEQ ID NO: 3572 - RNA, 23 nt, Artificial
  synthetic
ugcuuuugaaaagcuaggugaug

SEQ ID NO: 3573 - RNA, 23 nt, Artificial
  synthetic
uagcuuuugaaaagcuaggugau

SEQ ID NO: 3574 - RNA, 23 nt, Artificial
  synthetic
ucagcuuuugaaaagcuagguga

SEQ ID NO: 3575 - RNA, 23 nt, Artificial
  synthetic
uucagcuuuugaaaagcuaggug

SEQ ID NO: 3576 - RNA, 23 nt, Artificial
  synthetic
uuugauccauagauucagaugua

SEQ ID NO: 3577 - RNA, 23 nt, Artificial
  synthetic
uguugauccauagauucagaugu

SEQ ID NO: 3578 - RNA, 23 nt, Artificial
  synthetic
uaguugauccauagauucagaug

SEQ ID NO: 3579 - RNA, 23 nt, Artificial
  synthetic
uaguugauccauagauucagaug

SEQ ID NO: 3580 - RNA, 23 nt, Artificial
  synthetic
uuaguugauccauagauucagau

SEQ ID NO: 3581 - RNA, 23 nt, Artificial
  synthetic
uuaguugauccauagauucagau

SEQ ID NO: 3582 - RNA, 23 nt, Artificial
  synthetic
uuuaguaguugauccauagauuc

SEQ ID NO: 3583 - RNA, 23 nt, Artificial
  synthetic
ucuuaguaguugauccauagauu

SEQ ID NO: 3584 - RNA, 23 nt, Artificial
  synthetic
ugcuuaguaguugauccauagau

SEQ ID NO: 3585 - RNA, 23 nt, Artificial
  synthetic
uugcuuaguaguugauccauaga

SEQ ID NO: 3586 - RNA, 23 nt, Artificial
  synthetic
uuugcuuaguaguugauccauag

SEQ ID NO: 3587 - RNA, 23 nt, Artificial
  synthetic
uuuugcuuaguaguugauccaua

SEQ ID NO: 3588 - RNA, 23 nt, Artificial
  synthetic
uuuuugcuuaguaguugauccau

SEQ ID NO: 3589 - RNA, 23 nt, Artificial
  synthetic
uuuuuugcuuaguaguugaucca

SEQ ID NO: 3590 - RNA, 23 nt, Artificial
  synthetic
uaucucgugacuuuucuccuucu

SEQ ID NO: 3591 - RNA, 23 nt, Artificial
  synthetic
uaagaacgaggguugaacuccuu

SEQ ID NO: 3592 - RNA, 23 nt, Artificial
  synthetic
uagaaagaacgaggguugaacuc

SEQ ID NO: 3593 - RNA, 23 nt, Artificial
  synthetic
ugagaaagaacgaggguugaacu

SEQ ID NO: 3594 - RNA, 23 nt, Artificial
  synthetic
uagagaaagaacgaggguugaac

SEQ ID NO: 3595 - RNA, 23 nt, Artificial
  synthetic
ugagagaaagaacgaggguugaa

SEQ ID NO: 3596 - RNA, 23 nt, Artificial
  synthetic
uugagagaaagaacgaggguuga

SEQ ID NO: 3597 - RNA, 23 nt, Artificial
  synthetic
uuuuggcugagagaaagaacgag

SEQ ID NO: 3598 - RNA, 23 nt, Artificial
  synthetic
ucuuuggcugagagaaagaacga

SEQ ID NO: 3599 - RNA, 23 nt, Artificial
  synthetic
uuuaccuuguaugacaggacugu

SEQ ID NO: 3600 - RNA, 23 nt, Artificial
  synthetic
uauuaccuuguaugacaggacug

SEQ ID NO: 3601 - RNA, 23 nt, Artificial
  synthetic
uuggcauuaccuuguaugacagg

SEQ ID NO: 3602 - RNA, 23 nt, Artificial
  synthetic
ucuggcauuaccuuguaugacag

SEQ ID NO: 3603 - RNA, 23 nt, Artificial
  synthetic
ugguggaaauggcaaaguagaaa

SEQ ID NO: 3604 - RNA, 23 nt, Artificial
  synthetic
uaguucuaguuuucugugcuucc

SEQ ID NO: 3605 - RNA, 23 nt, Artificial
  synthetic
ugaaguucuaguuuucugugcuu

SEQ ID NO: 3606 - RNA, 23 nt, Artificial
  synthetic
uaugaaguucuaguuuucugugc

SEQ ID NO: 3607 - RNA, 23 nt, Artificial
  synthetic
uaaugaaguucuaguuuucugug

SEQ ID NO: 3608 - RNA, 23 nt, Artificial
  synthetic
uacuuccaguuucagcaagcaga

SEQ ID NO: 3609 - RNA, 23 nt, Artificial
  synthetic
uuaaauaacuuccaguuucagca

SEQ ID NO: 3610 - RNA, 23 nt, Artificial
  synthetic
uauaaauaacuuccaguuucagc

SEQ ID NO: 3611 - RNA, 23 nt, Artificial
  synthetic
uaauaaauaacuuccaguuucag

SEQ ID NO: 3612 - RNA, 23 nt, Artificial
  synthetic
uaauaaauaacuuccaguuucag

SEQ ID NO: 3613 - RNA, 23 nt, Artificial
  synthetic
ugauguguucaugacucucaagg

SEQ ID NO: 3614 - RNA, 23 nt, Artificial
  synthetic
uuagcugauguguucaugacucu

SEQ ID NO: 3615 - RNA, 23 nt, Artificial
  synthetic
uuagcugauguguucaugacucu

SEQ ID NO: 3616 - RNA, 23 nt, Artificial
  synthetic
ucuagcugauguguucaugacuc

SEQ ID NO: 3617 - RNA, 23 nt, Artificial
  synthetic
ucuagcugauguguucaugacuc

SEQ ID NO: 3618 - RNA, 23 nt, Artificial
  synthetic
uuugcuagcugauguguucauga

SEQ ID NO: 3619 - RNA, 23 nt, Artificial
  synthetic
uguugcuagcugauguguucaug

SEQ ID NO: 3620 - RNA, 23 nt, Artificial
  synthetic
uuacuucuguugcuagcugaugu

SEQ ID NO: 3621 - RNA, 23 nt, Artificial
  synthetic
uguuacuucuguugcuagcugau

SEQ ID NO: 3622 - RNA, 23 nt, Artificial
  synthetic
ucuuguuacuucuguugcuagcu

SEQ ID NO: 3623 - RNA, 23 nt, Artificial
  synthetic
uucuuguuacuucuguugcuagc

SEQ ID NO: 3624 - RNA, 23 nt, Artificial
  synthetic
ugaaucacucuuguuacuucugu

SEQ ID NO: 3625 - RNA, 23 nt, Artificial
  synthetic
ugaaucacucuuguuacuucugu

SEQ ID NO: 3626 - RNA, 23 nt, Artificial
  synthetic
uaaagcgguaauagcagcaagaa

SEQ ID NO: 3627 - RNA, 23 nt, Artificial
  synthetic
uuuuaaagcgguaauagcagcaa

SEQ ID NO: 3628 - RNA, 23 nt, Artificial
  synthetic
uugucaaguuuaguaaaagggcg

SEQ ID NO: 3629 - RNA, 23 nt, Artificial
  synthetic
uucugucaaguuuaguaaaaggg

SEQ ID NO: 3630 - RNA, 23 nt, Artificial
  synthetic
uuucugucaaguuuaguaaaagg

SEQ ID NO: 3631 - RNA, 23 nt, Artificial
  synthetic
uaacuucugucaaguuuaguaaa

SEQ ID NO: 3632 - RNA, 23 nt, Artificial
  synthetic
uugaacuucugucaaguuuagua

SEQ ID NO: 3633 - RNA, 23 nt, Artificial
  synthetic
uuuacugaacuucugucaaguuu

SEQ ID NO: 3634 - RNA, 23 nt, Artificial
  synthetic
uaauuuacugaacuucugucaag

SEQ ID NO: 3635 - RNA, 23 nt, Artificial
  synthetic
uagaauuuacugaacuucuguca

SEQ ID NO: 3636 - RNA, 23 nt, Artificial
  synthetic
uaagaauuuacugaacuucuguc

SEQ ID NO: 3637 - RNA, 23 nt, Artificial
  synthetic
uuaagaauuuacugaacuucugu

SEQ ID NO: 3638 - RNA, 23 nt, Artificial
  synthetic
uauaauaauccgucaguuuggcg

SEQ ID NO: 3639 - RNA, 23 nt, Artificial
  synthetic
uaguaaaaguuuucccuuaacuu

SEQ ID NO: 3640 - RNA, 23 nt, Artificial
  synthetic
uaaguaaaaguuuucccuuaacu

SEQ ID NO: 3641 - RNA, 23 nt, Artificial
  synthetic
uaaaguaaaaguuuucccuuaac

SEQ ID NO: 3642 - RNA, 23 nt, Artificial
  synthetic
uacaaaguaaaaguuuucccuua

SEQ ID NO: 3643 - RNA, 23 nt, Artificial
  synthetic
uuacaaaguaaaaguuuucccuu

SEQ ID NO: 3644 - RNA, 23 nt, Artificial
  synthetic
uucuacaaaguaaaaguuuuccc

SEQ ID NO: 3645 - RNA, 23 nt, Artificial
  synthetic
uaucuacaaaguaaaaguuuucc

SEQ ID NO: 3646 - RNA, 23 nt, Artificial
  synthetic
uaucuacaaaguaaaaguuuucc

SEQ ID NO: 3647 - DNA, 23 bp, Artificial
  synthetic
cctccgacttccggtaaagagtc

SEQ ID NO: 3648 - DNA, 23 bp, Artificial
  synthetic
ctccgacttccggtaaagagtcc

SEQ ID NO: 3649 - DNA, 23 bp, Artificial
  synthetic
tccgacttccggtaaagagtccc

SEQ ID NO: 3650 - DNA, 23 bp, Artificial
  synthetic
caaatgtgaagtacaagtgaaaa

SEQ ID NO: 3651 - DNA, 23 bp, Artificial
  synthetic
aaatgtgaagtacaagtgaaaaa

SEQ ID NO: 3652 - DNA, 23 bp, Artificial
  synthetic
atgtgaagtacaagtgaaaaatg

SEQ ID NO: 3653 - DNA, 23 bp, Artificial
  synthetic
cacatgagaaaagtacagaatcc

SEQ ID NO: 3654 - DNA, 23 bp, Artificial
  synthetic
tccacttctcacacttcagattt

SEQ ID NO: 3655 - DNA, 23 bp, Artificial
  synthetic
ccacttctcacacttcagatttc

SEQ ID NO: 3656 - DNA, 23 bp, Artificial
  synthetic
cacttctcacacttcagatttca

SEQ ID NO: 3657 - DNA, 23 bp, Artificial
  synthetic
acttctcacacttcagatttcaa

SEQ ID NO: 3658 - DNA, 23 bp, Artificial
  synthetic
cttctcacacttcagatttcaac

SEQ ID NO: 3659 - DNA, 23 bp, Artificial
  synthetic
ttctcacacttcagatttcaacc

SEQ ID NO: 3660 - DNA, 23 bp, Artificial
  synthetic
tctcacacttcagatttcaaccc

SEQ ID NO: 3661 - DNA, 23 bp, Artificial
  synthetic
ctcacacttcagatttcaacccg

SEQ ID NO: 3662 - DNA, 23 bp, Artificial
  synthetic
acacttcagatttcaacccgaat

SEQ ID NO: 3663 - DNA, 23 bp, Artificial
  synthetic
gttcagaccaaagagtagttaat

SEQ ID NO: 3664 - DNA, 23 bp, Artificial
  synthetic
ttcagaccaaagagtagttaatg

SEQ ID NO: 3665 - DNA, 23 bp, Artificial
  synthetic
gtctctactatgcctaaacgcat

SEQ ID NO: 3666 - DNA, 23 bp, Artificial
  synthetic
tctctactatgcctaaacgcatg

SEQ ID NO: 3667 - DNA, 23 bp, Artificial
  synthetic
tctactatgcctaaacgcatgtc

SEQ ID NO: 3668 - DNA, 23 bp, Artificial
  synthetic
tacttctgaatctatggatcaac

SEQ ID NO: 3669 - DNA, 23 bp, Artificial
  synthetic
acttctgaatctatggatcaact

SEQ ID NO: 3670 - DNA, 23 bp, Artificial
  synthetic
cttctgaatctatggatcaacta

SEQ ID NO: 3671 - DNA, 23 bp, Artificial
  synthetic
ttctgaatctatggatcaactac

SEQ ID NO: 3672 - DNA, 23 bp, Artificial
  synthetic
tctgaatctatggatcaactact

SEQ ID NO: 3673 - DNA, 23 bp, Artificial
  synthetic
ctgaatctatggatcaactacta

SEQ ID NO: 3674 - DNA, 23 bp, Artificial
  synthetic
tgaatctatggatcaactactaa

SEQ ID NO: 3675 - DNA, 23 bp, Artificial
  synthetic
gaatctatggatcaactactaaa

SEQ ID NO: 3676 - DNA, 23 bp, Artificial
  synthetic
tttatacccaatacctatgacgc

SEQ ID NO: 3677 - DNA, 23 bp, Artificial
  synthetic
aagacatatagagcagtaccaaa

SEQ ID NO: 3678 - DNA, 23 bp, Artificial
  synthetic
acatatagagcagtaccaaatat

SEQ ID NO: 3679 - DNA, 23 bp, Artificial
  synthetic
catatagagcagtaccaaatatg

SEQ ID NO: 3680 - DNA, 23 bp, Artificial
  synthetic
atatagagcagtaccaaatatgc

SEQ ID NO: 3681 - DNA, 23 bp, Artificial
  synthetic
atagagcagtaccaaatatgccc

SEQ ID NO: 3682 - DNA, 23 bp, Artificial
  synthetic
catgtcccaaattaccatacaac

SEQ ID NO: 3683 - DNA, 23 bp, Artificial
  synthetic
tgtcccaaattaccatacaacaa

SEQ ID NO: 3684 - DNA, 23 bp, Artificial
  synthetic
acaagcccttctttctactttgc

SEQ ID NO: 3685 - DNA, 23 bp, Artificial
  synthetic
agcccttctttctactttgccat

SEQ ID NO: 3686 - DNA, 23 bp, Artificial
  synthetic
gcccttctttctactttgccatt

SEQ ID NO: 3687 - DNA, 23 bp, Artificial
  synthetic
cccttctttctactttgccattt

SEQ ID NO: 3688 - DNA, 23 bp, Artificial
  synthetic
ccttctttctactttgccatttc

SEQ ID NO: 3689 - DNA, 23 bp, Artificial
  synthetic
cttctttctactttgccatttcc

SEQ ID NO: 3690 - DNA, 23 bp, Artificial
  synthetic
ttctttctactttgccatttcca

SEQ ID NO: 3691 - DNA, 23 bp, Artificial
  synthetic
tctttctactttgccatttccac

SEQ ID NO: 3692 - DNA, 23 bp, Artificial
  synthetic
ctttctactttgccatttccacg

SEQ ID NO: 3693 - DNA, 23 bp, Artificial
  synthetic
ctcatgtacagtcaggaatggtt

SEQ ID NO: 3694 - DNA, 23 bp, Artificial
  synthetic
tcatgtacagtcaggaatggttc

SEQ ID NO: 3695 - DNA, 23 bp, Artificial
  synthetic
catgtacagtcaggaatggttcc

SEQ ID NO: 3696 - DNA, 23 bp, Artificial
  synthetic
gtcaggaatggttccttctcatc

SEQ ID NO: 3697 - DNA, 23 bp, Artificial
  synthetic
aggaatggttccttctcatccaa

SEQ ID NO: 3698 - DNA, 23 bp, Artificial
  synthetic
gaatggttccttctcatccaact

SEQ ID NO: 3699 - DNA, 23 bp, Artificial
  synthetic
aatggttccttctcatccaactg

SEQ ID NO: 3700 - DNA, 23 bp, Artificial
  synthetic
tggttccttctcatccaactgcc

SEQ ID NO: 3701 - DNA, 23 bp, Artificial
  synthetic
cccatgcgccaatgatgctaatg

SEQ ID NO: 3702 - DNA, 23 bp, Artificial
  synthetic
atgcgccaatgatgctaatgacg

SEQ ID NO: 3703 - DNA, 23 bp, Artificial
  synthetic
gcgccaatgatgctaatgacgac

SEQ ID NO: 3704 - DNA, 23 bp, Artificial
  synthetic
cgccaatgatgctaatgacgaca

SEQ ID NO: 3705 - DNA, 23 bp, Artificial
  synthetic
caatgatgctaatgacgacacag

SEQ ID NO: 3706 - DNA, 23 bp, Artificial
  synthetic
aatgatgctaatgacgacacagc

SEQ ID NO: 3707 - DNA, 23 bp, Artificial
  synthetic
ctcgctcaaagtgcactacagcc

SEQ ID NO: 3708 - DNA, 23 bp, Artificial
  synthetic
acagcccattccagtctcgacaa

SEQ ID NO: 3709 - DNA, 23 bp, Artificial
  synthetic
agcccattccagtctcgacaaca

SEQ ID NO: 3710 - DNA, 23 bp, Artificial
  synthetic
cccaccaccaacagcagttgtaa

SEQ ID NO: 3711 - DNA, 23 bp, Artificial
  synthetic
ccaccaccaacagcagttgtaag

SEQ ID NO: 3712 - DNA, 23 bp, Artificial
  synthetic
caccaccaacagcagttgtaagg

SEQ ID NO: 3713 - DNA, 23 bp, Artificial
  synthetic
ccaccaacagcagttgtaaggct

SEQ ID NO: 3714 - DNA, 23 bp, Artificial
  synthetic
accaacagcagttgtaaggctgc

SEQ ID NO: 3715 - DNA, 23 bp, Artificial
  synthetic
cccttctactgcttctaccaact

SEQ ID NO: 3716 - DNA, 23 bp, Artificial
  synthetic
cttctactgcttctaccaactgg

SEQ ID NO: 3717 - DNA, 23 bp, Artificial
  synthetic
ttctactgcttctaccaactgga

SEQ ID NO: 3718 - DNA, 23 bp, Artificial
  synthetic
tactgcttctaccaactggaagc

SEQ ID NO: 3719 - DNA, 23 bp, Artificial
  synthetic
accaactggaagcacagaaaact

SEQ ID NO: 3720 - DNA, 23 bp, Artificial
  synthetic
tgttgatttcttgtaacatccaa

SEQ ID NO: 3721 - DNA, 23 bp, Artificial
  synthetic
tgatttcttgtaacatccaatag

SEQ ID NO: 3722 - DNA, 23 bp, Artificial
  synthetic
atttcttgtaacatccaatagga

SEQ ID NO: 3723 - DNA, 23 bp, Artificial
  synthetic
tttcttgtaacatccaataggaa

SEQ ID NO: 3724 - DNA, 23 bp, Artificial
  synthetic
cttgtaacatccaataggaatgc

SEQ ID NO: 3725 - DNA, 23 bp, Artificial
  synthetic
tgtaacatccaataggaatgcta

SEQ ID NO: 3726 - DNA, 23 bp, Artificial
  synthetic
gtaacatccaataggaatgctaa

SEQ ID NO: 3727 - DNA, 23 bp, Artificial
  synthetic
taacatccaataggaatgctaac

SEQ ID NO: 3728 - DNA, 23 bp, Artificial
  synthetic
aacatccaataggaatgctaaca

SEQ ID NO: 3729 - DNA, 23 bp, Artificial
  synthetic
ccaataggaatgctaacagttca

SEQ ID NO: 3730 - DNA, 23 bp, Artificial
  synthetic
caataggaatgctaacagttcac

SEQ ID NO: 3731 - DNA, 23 bp, Artificial
  synthetic
aataggaatgctaacagttcact

SEQ ID NO: 3732 - DNA, 23 bp, Artificial
  synthetic
ataggaatgctaacagttcactt

SEQ ID NO: 3733 - DNA, 23 bp, Artificial
  synthetic
taggaatgctaacagttcacttg

SEQ ID NO: 3734 - DNA, 23 bp, Artificial
  synthetic
aggaatgctaacagttcacttgc

SEQ ID NO: 3735 - DNA, 23 bp, Artificial
  synthetic
atgctaacagttcacttgcagtg

SEQ ID NO: 3736 - DNA, 23 bp, Artificial
  synthetic
aacagttcacttgcagtggaaga

SEQ ID NO: 3737 - DNA, 23 bp, Artificial
  synthetic
tggaccgagtagaggcatttagg

SEQ ID NO: 3738 - DNA, 23 bp, Artificial
  synthetic
ggaccgagtagaggcatttagga

SEQ ID NO: 3739 - DNA, 23 bp, Artificial
  synthetic
ggggctattccataattccatat

SEQ ID NO: 3740 - DNA, 23 bp, Artificial
  synthetic
cttgccgaaactggaagttattt

SEQ ID NO: 3741 - DNA, 23 bp, Artificial
  synthetic
tgccgaaactggaagttatttat

SEQ ID NO: 3742 - DNA, 23 bp, Artificial
  synthetic
gccgaaactggaagttatttatt

SEQ ID NO: 3743 - DNA, 23 bp, Artificial
  synthetic
ccgaaactggaagttatttattt

SEQ ID NO: 3744 - DNA, 23 bp, Artificial
  synthetic
cgaaactggaagttatttatttt

SEQ ID NO: 3745 - DNA, 23 bp, Artificial
  synthetic
tttaataacccttgaaagtcatg

SEQ ID NO: 3746 - DNA, 23 bp, Artificial
  synthetic
ttaataacccttgaaagtcatga

SEQ ID NO: 3747 - DNA, 23 bp, Artificial
  synthetic
ataacccttgaaagtcatgaaca

SEQ ID NO: 3748 - DNA, 23 bp, Artificial
  synthetic
cccttgaaagtcatgaacacatc

SEQ ID NO: 3749 - DNA, 23 bp, Artificial
  synthetic
aaagtcatgaacacatcagctag

SEQ ID NO: 3750 - DNA, 23 bp, Artificial
  synthetic
aagtcatgaacacatcagctagc

SEQ ID NO: 3751 - DNA, 23 bp, Artificial
  synthetic
agtcatgaacacatcagctagca

SEQ ID NO: 3752 - DNA, 23 bp, Artificial
  synthetic
gtcatgaacacatcagctagcaa

SEQ ID NO: 3753 - DNA, 23 bp, Artificial
  synthetic
gtcatgaacacatcagctagcaa

SEQ ID NO: 3754 - DNA, 23 bp, Artificial
  synthetic
tcatgaacacatcagctagcaaa

SEQ ID NO: 3755 - DNA, 23 bp, Artificial
  synthetic
catgaacacatcagctagcaaaa

SEQ ID NO: 3756 - DNA, 23 bp, Artificial
  synthetic
atgaacacatcagctagcaaaag

SEQ ID NO: 3757 - DNA, 23 bp, Artificial
  synthetic
tgaacacatcagctagcaaaaga

SEQ ID NO: 3758 - DNA, 23 bp, Artificial
  synthetic
cacatcagctagcaaaagaagta

SEQ ID NO: 3759 - DNA, 23 bp, Artificial
  synthetic
agctagcaaaagaagtaacaaga

SEQ ID NO: 3760 - DNA, 23 bp, Artificial
  synthetic
aagtaacaagagtgattcttgct

SEQ ID NO: 3761 - DNA, 23 bp, Artificial
  synthetic
agtaacaagagtgattcttgctg

SEQ ID NO: 3762 - DNA, 23 bp, Artificial
  synthetic
gtaacaagagtgattcttgctgc

SEQ ID NO: 3763 - DNA, 23 bp, Artificial
  synthetic
caagagtgattcttgctgctatt

SEQ ID NO: 3764 - DNA, 23 bp, Artificial
  synthetic
aagagtgattcttgctgctatta

SEQ ID NO: 3765 - DNA, 23 bp, Artificial
  synthetic
gagtgattcttgctgctattact

SEQ ID NO: 3766 - DNA, 23 bp, Artificial
  synthetic
acttggaacgcccttttactaaa

SEQ ID NO: 3767 - DNA, 23 bp, Artificial
  synthetic
cttggaacgcccttttactaaac

SEQ ID NO: 3768 - DNA, 23 bp, Artificial
  synthetic
tggaacgcccttttactaaactt

SEQ ID NO: 3769 - DNA, 23 bp, Artificial
  synthetic
ggaacgcccttttactaaacttg

SEQ ID NO: 3770 - DNA, 23 bp, Artificial
  synthetic
gaacgcccttttactaaacttga

SEQ ID NO: 3771 - DNA, 23 bp, Artificial
  synthetic
aacgcccttttactaaacttgac

SEQ ID NO: 3772 - DNA, 23 bp, Artificial
  synthetic
aagtttcagtaaattcttaccgt

SEQ ID NO: 3773 - DNA, 23 bp, Artificial
  synthetic
agtttcagtaaattcttaccgtc

SEQ ID NO: 3774 - DNA, 23 bp, Artificial
  synthetic
gtttcagtaaattcttaccgtca

SEQ ID NO: 3775 - DNA, 23 bp, Artificial
  synthetic
tttcagtaaattcttaccgtcaa

SEQ ID NO: 3776 - DNA, 23 bp, Artificial
  synthetic
ttcagtaaattcttaccgtcaaa

SEQ ID NO: 3777 - DNA, 23 bp, Artificial
  synthetic
tcagtaaattcttaccgtcaaac

SEQ ID NO: 3778 - DNA, 23 bp, Artificial
  synthetic
cagtaaattcttaccgtcaaact

SEQ ID NO: 3779 - DNA, 23 bp, Artificial
  synthetic
agtaaattcttaccgtcaaactg

SEQ ID NO: 3780 - DNA, 23 bp, Artificial
  synthetic
gtaaattcttaccgtcaaactga

SEQ ID NO: 3781 - DNA, 23 bp, Artificial
  synthetic
taaattcttaccgtcaaactgac

SEQ ID NO: 3782 - DNA, 23 bp, Artificial
  synthetic
aaattcttaccgtcaaactgacg

SEQ ID NO: 3783 - DNA, 23 bp, Artificial
  synthetic
aattcttaccgtcaaactgacgg

SEQ ID NO: 3784 - DNA, 23 bp, Artificial
  synthetic
attcttaccgtcaaactgacgga

SEQ ID NO: 3785 - DNA, 23 bp, Artificial
  synthetic
ttcttaccgtcaaactgacggat

SEQ ID NO: 3786 - DNA, 23 bp, Artificial
  synthetic
tcttaccgtcaaactgacggatt

SEQ ID NO: 3787 - DNA, 23 bp, Artificial
  synthetic
cttaccgtcaaactgacggatta

SEQ ID NO: 3788 - DNA, 23 bp, Artificial
  synthetic
cttaccgtcaaactgacggatta

SEQ ID NO: 3789 - DNA, 23 bp, Artificial
  synthetic
ttaccgtcaaactgacggattat

SEQ ID NO: 3790 - DNA, 23 bp, Artificial
  synthetic
caaactgacggattattatttat

SEQ ID NO: 3791 - DNA, 23 bp, Artificial
  synthetic
caagtttgatgaggtgatcactg

SEQ ID NO: 3792 - DNA, 23 bp, Artificial
  synthetic
tcactgtctacagtggttcaact

SEQ ID NO: 3793 - DNA, 23 bp, Artificial
  synthetic
cactgtctacagtggttcaactt

SEQ ID NO: 3794 - DNA, 23 bp, Artificial
  synthetic
gtctacagtggttcaacttttaa

SEQ ID NO: 3795 - DNA, 23 bp, Artificial
  synthetic
tctacagtggttcaacttttaag

SEQ ID NO: 3796 - DNA, 23 bp, Artificial
  synthetic
gttcaacttttaagttaagggaa

SEQ ID NO: 3797 - DNA, 23 bp, Artificial
  synthetic
tcaacttttaagttaagggaaaa

SEQ ID NO: 3798 - DNA, 23 bp, Artificial
  synthetic
ggaaaaacttttactttgtagat

SEQ ID NO: 3799 - DNA, 23 bp, Artificial
  synthetic
gcctcagtctacgatttcttttg

SEQ ID NO: 3800 - DNA, 23 bp, Artificial
  synthetic
cctcagtctacgatttcttttga

SEQ ID NO: 3801 - DNA, 23 bp, Artificial
  synthetic
ctcagtctacgatttcttttgat

SEQ ID NO: 3802 - DNA, 23 bp, Artificial
  synthetic
cacatgagaaaagtacagaatcc

SEQ ID NO: 3803 - DNA, 23 bp, Artificial
  synthetic
cacatgagaaaagtacagaatcc

SEQ ID NO: 3804 - DNA, 23 bp, Artificial
  synthetic
tcaaatgttcagactttgttgtg

SEQ ID NO: 3805 - DNA, 23 bp, Artificial
  synthetic
tctgctatcagtgctaaagtgaa

SEQ ID NO: 3806 - DNA, 23 bp, Artificial
  synthetic
tacgtatgatagcagtttatctt

SEQ ID NO: 3807 - DNA, 23 bp, Artificial
  synthetic
acgtatgatagcagtttatcttc

SEQ ID NO: 3808 - DNA, 23 bp, Artificial
  synthetic
gagataactcagaagaattttta

SEQ ID NO: 3809 - DNA, 23 bp, Artificial
  synthetic
agatccacttctcacacttcaga

SEQ ID NO: 3810 - DNA, 23 bp, Artificial
  synthetic
cttctcacacttcagatttcaac

SEQ ID NO: 3811 - DNA, 23 bp, Artificial
  synthetic
gtctctactatgcctaaacgcat

SEQ ID NO: 3812 - DNA, 23 bp, Artificial
  synthetic
tctctactatgcctaaacgcatg

SEQ ID NO: 3813 - DNA, 23 bp, Artificial
  synthetic
cctcgaaatcacagagtttctgc

SEQ ID NO: 3814 - DNA, 23 bp, Artificial
  synthetic
ctcgaaatcacagagtttctgct

SEQ ID NO: 3815 - DNA, 23 bp, Artificial
  synthetic
aagttctacttctgaatctatgg

SEQ ID NO: 3816 - DNA, 23 bp, Artificial
  synthetic
agttctacttctgaatctatgga

SEQ ID NO: 3817 - DNA, 23 bp, Artificial
  synthetic
gttctacttctgaatctatggat

SEQ ID NO: 3818 - DNA, 23 bp, Artificial
  synthetic
ttctacttctgaatctatggatc

SEQ ID NO: 3819 - DNA, 23 bp, Artificial
  synthetic
tctgaatctatggatcaactact

SEQ ID NO: 3820 - DNA, 23 bp, Artificial
  synthetic
tctgaatctatggatcaactact

SEQ ID NO: 3821 - DNA, 23 bp, Artificial
  synthetic
caactactaaacaaaaatagaga

SEQ ID NO: 3822 - DNA, 23 bp, Artificial
  synthetic
gaaccaagtgctaaggattcttt

SEQ ID NO: 3823 - DNA, 23 bp, Artificial
  synthetic
agttaggaaatcaacattgaatc

SEQ ID NO: 3824 - DNA, 23 bp, Artificial
  synthetic
acagccaactccagtttatactc

SEQ ID NO: 3825 - DNA, 23 bp, Artificial
  synthetic
tcttcttcagcaactcagtacgg

SEQ ID NO: 3826 - DNA, 23 bp, Artificial
  synthetic
tctttctactttgccatttccac

SEQ ID NO: 3827 - DNA, 23 bp, Artificial
  synthetic
ctttctactttgccatttccacg

SEQ ID NO: 3828 - DNA, 23 bp, Artificial
  synthetic
tttcttgtaacatccaataggaa

SEQ ID NO: 3829 - DNA, 23 bp, Artificial
  synthetic
tgccgaaactggaagttatttat

SEQ ID NO: 3830 - DNA, 23 bp, Artificial
  synthetic
tgccgaaactggaagttatttat

SEQ ID NO: 3831 - DNA, 23 bp, Artificial
  synthetic
tgccgaaactggaagttatttat

SEQ ID NO: 3832 - DNA, 23 bp, Artificial
  synthetic
cgaaactggaagttatttatttt

SEQ ID NO: 3833 - DNA, 23 bp, Artificial
  synthetic
cccttgaaagtcatgaacacatc

SEQ ID NO: 3834 - DNA, 23 bp, Artificial
  synthetic
cccttgaaagtcatgaacacatc

SEQ ID NO: 3835 - DNA, 23 bp, Artificial
  synthetic
aaagtcatgaacacatcagctag

SEQ ID NO: 3836 - DNA, 23 bp, Artificial
  synthetic
aaagtcatgaacacatcagctag

SEQ ID NO: 3837 - DNA, 23 bp, Artificial
  synthetic
aaagtcatgaacacatcagctag

SEQ ID NO: 3838 - DNA, 23 bp, Artificial
  synthetic
aagtcatgaacacatcagctagc

SEQ ID NO: 3839 - DNA, 23 bp, Artificial
  synthetic
aagtcatgaacacatcagctagc

SEQ ID NO: 3840 - DNA, 23 bp, Artificial
  synthetic
gtcatgaacacatcagctagcaa

SEQ ID NO: 3841 - DNA, 23 bp, Artificial
  synthetic
caagagtgattcttgctgctatt

SEQ ID NO: 3842 - DNA, 23 bp, Artificial
  synthetic
caagagtgattcttgctgctatt

SEQ ID NO: 3843 - DNA, 23 bp, Artificial
  synthetic
gagtgattcttgctgctattact

SEQ ID NO: 3844 - DNA, 23 bp, Artificial
  synthetic
gagtgattcttgctgctattact

SEQ ID NO: 3845 - DNA, 23 bp, Artificial
  synthetic
aacgcccttttactaaacttgac

SEQ ID NO: 3846 - DNA, 23 bp, Artificial
  synthetic
aacgcccttttactaaacttgac

SEQ ID NO: 3847 - DNA, 23 bp, Artificial
  synthetic
cttaccgtcaaactgacggatta

SEQ ID NO: 3848 - DNA, 23 bp, Artificial
  synthetic
tcactgtctacagtggttcaact

SEQ ID NO: 3849 - DNA, 23 bp, Artificial
  synthetic
tcactgtctacagtggttcaact

SEQ ID NO: 3850 - DNA, 23 bp, Artificial
  synthetic
acagtggttcaacttttaagtta

SEQ ID NO: 3851 - DNA, 23 bp, Artificial
  synthetic
cagtggttcaacttttaagttaa

SEQ ID NO: 3852 - DNA, 23 bp, Artificial
  synthetic
gttaagggaaaaacttttacttt

SEQ ID NO: 3853 - DNA, 23 bp, Artificial
  synthetic
tgcctcagcctacgatttctttt

SEQ ID NO: 3854 - DNA, 23 bp, Artificial
  synthetic
gcctcagcctacgatttcttttg

SEQ ID NO: 3855 - DNA, 23 bp, Artificial
  synthetic
cctcagcctacgatttcttttga

SEQ ID NO: 3856 - DNA, 23 bp, Artificial
  synthetic
gtgaggatggttcatatacttac

SEQ ID NO: 3857 - DNA, 23 bp, Artificial
  synthetic
atgaggatggttcatatacttac

SEQ ID NO: 3858 - DNA, 23 bp, Artificial
  synthetic
tgaggatggttcatatacttacg

SEQ ID NO: 3859 - DNA, 23 bp, Artificial
  synthetic
gaaatgtgaagtacaagtgaaaa

SEQ ID NO: 3860 - DNA, 23 bp, Artificial
  synthetic
caaatgtgaagtacaagtgaaaa

SEQ ID NO: 3861 - DNA, 23 bp, Artificial
  synthetic
atgtgaagtacaagtgaaaaacg

SEQ ID NO: 3862 - DNA, 23 bp, Artificial
  synthetic
tgaaggagtttttaaaacataca

SEQ ID NO: 3863 - DNA, 23 bp, Artificial
  synthetic
gaaggagtttttaaaacatacag

SEQ ID NO: 3864 - DNA, 23 bp, Artificial
  synthetic
taaaacatacagtcctaagtgtg

SEQ ID NO: 3865 - DNA, 23 bp, Artificial
  synthetic
aaaacatacagtcctaagtgtga

SEQ ID NO: 3866 - DNA, 23 bp, Artificial
  synthetic
aaacatacagtcctaagtgtgac

SEQ ID NO: 3867 - DNA, 23 bp, Artificial
  synthetic
atgctgcacatgagaaaagtaca

SEQ ID NO: 3868 - DNA, 23 bp, Artificial
  synthetic
tgctgcacatgagaaaagtacag

SEQ ID NO: 3869 - DNA, 23 bp, Artificial
  synthetic
taatggagagtgttttgttcaaa

SEQ ID NO: 3870 - DNA, 23 bp, Artificial
  synthetic
atggagagtgttttgttcaaatg

SEQ ID NO: 3871 - DNA, 23 bp, Artificial
  synthetic
gttttgttcaaatgctcagactt

SEQ ID NO: 3872 - DNA, 23 bp, Artificial
  synthetic
tttgttcaaatgctcagacttcg

SEQ ID NO: 3873 - DNA, 23 bp, Artificial
  synthetic
ttgttcaaatgctcagacttcgt

SEQ ID NO: 3874 - DNA, 23 bp, Artificial
  synthetic
tgttcaaatgctcagacttcgtt

SEQ ID NO: 3875 - DNA, 23 bp, Artificial
  synthetic
gttcaaatgctcagacttcgttg

SEQ ID NO: 3876 - DNA, 23 bp, Artificial
  synthetic
ttcaaatgctcagacttcgttgt

SEQ ID NO: 3877 - DNA, 23 bp, Artificial
  synthetic
tcaaatgctcagacttcgttgtg

SEQ ID NO: 3878 - DNA, 23 bp, Artificial
  synthetic
caaatgctcagacttcgttgtgg

SEQ ID NO: 3879 - DNA, 23 bp, Artificial
  synthetic
tgacatgtttcgatataatgaag

SEQ ID NO: 3880 - DNA, 23 bp, Artificial
  synthetic
agtttatcttcatatacggttcc

SEQ ID NO: 3881 - DNA, 23 bp, Artificial
  synthetic
aaagggacaactcagaagaattt

SEQ ID NO: 3882 - DNA, 23 bp, Artificial
  synthetic
aagggacaactcagaagaatttc

SEQ ID NO: 3883 - DNA, 23 bp, Artificial
  synthetic
agggacaactcagaagaatttct

SEQ ID NO: 3884 - DNA, 23 bp, Artificial
  synthetic
gggacaactcagaagaatttctt

SEQ ID NO: 3885 - DNA, 23 bp, Artificial
  synthetic
gctgcttctcacacttcagattt

SEQ ID NO: 3886 - DNA, 23 bp, Artificial
  synthetic
ctgcttctcacacttcagatttc

SEQ ID NO: 3887 - DNA, 23 bp, Artificial
  synthetic
tgcttctcacacttcagatttca

SEQ ID NO: 3888 - DNA, 23 bp, Artificial
  synthetic
cacttctcacacttcagatttca

SEQ ID NO: 3889 - DNA, 23 bp, Artificial
  synthetic
gcttctcacacttcagatttcaa

SEQ ID NO: 3890 - DNA, 23 bp, Artificial
  synthetic
acttctcacacttcagatttcaa

SEQ ID NO: 3891 - DNA, 23 bp, Artificial
  synthetic
gctcagaccaaagagtagttaat

SEQ ID NO: 3892 - DNA, 23 bp, Artificial
  synthetic
gttcagaccaaagagtagttaat

SEQ ID NO: 3893 - DNA, 23 bp, Artificial
  synthetic
ctcagaccaaagagtagttaatg

SEQ ID NO: 3894 - DNA, 23 bp, Artificial
  synthetic
ttcagaccaaagagtagttaatg

SEQ ID NO: 3895 - DNA, 23 bp, Artificial
  synthetic
cctagaatttgtatcccacaatc

SEQ ID NO: 3896 - DNA, 23 bp, Artificial
  synthetic
ctagaatttgtatcccacaatcc

SEQ ID NO: 3897 - DNA, 23 bp, Artificial
  synthetic
tagaatttgtatcccacaatccc

SEQ ID NO: 3898 - DNA, 23 bp, Artificial
  synthetic
aagtgaaacatcacctagctttt

SEQ ID NO: 3899 - DNA, 23 bp, Artificial
  synthetic
agtgaaacatcacctagcttttc

SEQ ID NO: 3900 - DNA, 23 bp, Artificial
  synthetic
gtgaaacatcacctagcttttca

SEQ ID NO: 3901 - DNA, 23 bp, Artificial
  synthetic
tgaaacatcacctagcttttcaa

SEQ ID NO: 3902 - DNA, 23 bp, Artificial
  synthetic
gaaacatcacctagcttttcaaa

SEQ ID NO: 3903 - DNA, 23 bp, Artificial
  synthetic
aaacatcacctagcttttcaaaa

SEQ ID NO: 3904 - DNA, 23 bp, Artificial
  synthetic
aacatcacctagcttttcaaaag

SEQ ID NO: 3905 - DNA, 23 bp, Artificial
  synthetic
acatcacctagcttttcaaaagc

SEQ ID NO: 3906 - DNA, 23 bp, Artificial
  synthetic
catcacctagcttttcaaaagct

SEQ ID NO: 3907 - DNA, 23 bp, Artificial
  synthetic
atcacctagcttttcaaaagctg

SEQ ID NO: 3908 - DNA, 23 bp, Artificial
  synthetic
tcacctagcttttcaaaagctga

SEQ ID NO: 3909 - DNA, 23 bp, Artificial
  synthetic
cacctagcttttcaaaagctgac

SEQ ID NO: 3910 - DNA, 23 bp, Artificial
  synthetic
tacatctgaatctatggatcaac

SEQ ID NO: 3911 - DNA, 23 bp, Artificial
  synthetic
acatctgaatctatggatcaact

SEQ ID NO: 3912 - DNA, 23 bp, Artificial
  synthetic
catctgaatctatggatcaacta

SEQ ID NO: 3913 - DNA, 23 bp, Artificial
  synthetic
cttctgaatctatggatcaacta

SEQ ID NO: 3914 - DNA, 23 bp, Artificial
  synthetic
atctgaatctatggatcaactac

SEQ ID NO: 3915 - DNA, 23 bp, Artificial
  synthetic
ttctgaatctatggatcaactac

SEQ ID NO: 3916 - DNA, 23 bp, Artificial
  synthetic
gaatctatggatcaactactaag

SEQ ID NO: 3917 - DNA, 23 bp, Artificial
  synthetic
aatctatggatcaactactaagc

SEQ ID NO: 3918 - DNA, 23 bp, Artificial
  synthetic
atctatggatcaactactaagca

SEQ ID NO: 3919 - DNA, 23 bp, Artificial
  synthetic
tctatggatcaactactaagcaa

SEQ ID NO: 3920 - DNA, 23 bp, Artificial
  synthetic
ctatggatcaactactaagcaaa

SEQ ID NO: 3921 - DNA, 23 bp, Artificial
  synthetic
tatggatcaactactaagcaaaa

SEQ ID NO: 3922 - DNA, 23 bp, Artificial
  synthetic
atggatcaactactaagcaaaaa

SEQ ID NO: 3923 - DNA, 23 bp, Artificial
  synthetic
tggatcaactactaagcaaaaat

SEQ ID NO: 3924 - DNA, 23 bp, Artificial
  synthetic
agaaggagaaaagtcacgagatt

SEQ ID NO: 3925 - DNA, 23 bp, Artificial
  synthetic
aaggagttcaaccctcgttcttt

SEQ ID NO: 3926 - DNA, 23 bp, Artificial
  synthetic
gagttcaaccctcgttctttctc

SEQ ID NO: 3927 - DNA, 23 bp, Artificial
  synthetic
agttcaaccctcgttctttctct

SEQ ID NO: 3928 - DNA, 23 bp, Artificial
  synthetic
gttcaaccctcgttctttctctc

SEQ ID NO: 3929 - DNA, 23 bp, Artificial
  synthetic
ttcaaccctcgttctttctctca

SEQ ID NO: 3930 - DNA, 23 bp, Artificial
  synthetic
tcaaccctcgttctttctctcag

SEQ ID NO: 3931 - DNA, 23 bp, Artificial
  synthetic
ctcgttctttctctcagccaaag

SEQ ID NO: 3932 - DNA, 23 bp, Artificial
  synthetic
tcgttctttctctcagccaaagc

SEQ ID NO: 3933 - DNA, 23 bp, Artificial
  synthetic
acagtcctgtcatacaaggtaat

SEQ ID NO: 3934 - DNA, 23 bp, Artificial
  synthetic
cagtcctgtcatacaaggtaatg

SEQ ID NO: 3935 - DNA, 23 bp, Artificial
  synthetic
cctgtcatacaaggtaatgccag

SEQ ID NO: 3936 - DNA, 23 bp, Artificial
  synthetic
ctgtcatacaaggtaatgccagg

SEQ ID NO: 3937 - DNA, 23 bp, Artificial
  synthetic
tttctactttgccatttccaccg

SEQ ID NO: 3938 - DNA, 23 bp, Artificial
  synthetic
ggaagcacagaaaactagaactt

SEQ ID NO: 3939 - DNA, 23 bp, Artificial
  synthetic
aagcacagaaaactagaacttca

SEQ ID NO: 3940 - DNA, 23 bp, Artificial
  synthetic
gcacagaaaactagaacttcatt

SEQ ID NO: 3941 - DNA, 23 bp, Artificial
  synthetic
cacagaaaactagaacttcattg

SEQ ID NO: 3942 - DNA, 23 bp, Artificial
  synthetic
tctgcttgctgaaactggaagtt

SEQ ID NO: 3943 - DNA, 23 bp, Artificial
  synthetic
tgctgaaactggaagttatttat

SEQ ID NO: 3944 - DNA, 23 bp, Artificial
  synthetic
gctgaaactggaagttatttatt

SEQ ID NO: 3945 - DNA, 23 bp, Artificial
  synthetic
ctgaaactggaagttatttattt

SEQ ID NO: 3946 - DNA, 23 bp, Artificial
  synthetic
ccgaaactggaagttatttattt

SEQ ID NO: 3947 - DNA, 23 bp, Artificial
  synthetic
ccttgagagtcatgaacacatca

SEQ ID NO: 3948 - DNA, 23 bp, Artificial
  synthetic
agagtcatgaacacatcagctag

SEQ ID NO: 3949 - DNA, 23 bp, Artificial
  synthetic
aaagtcatgaacacatcagctag

SEQ ID NO: 3950 - DNA, 23 bp, Artificial
  synthetic
gagtcatgaacacatcagctagc

SEQ ID NO: 3951 - DNA, 23 bp, Artificial
  synthetic
aagtcatgaacacatcagctagc

SEQ ID NO: 3952 - DNA, 23 bp, Artificial
  synthetic
tcatgaacacatcagctagcaac

SEQ ID NO: 3953 - DNA, 23 bp, Artificial
  synthetic
catgaacacatcagctagcaaca

SEQ ID NO: 3954 - DNA, 23 bp, Artificial
  synthetic
acatcagctagcaacagaagtaa

SEQ ID NO: 3955 - DNA, 23 bp, Artificial
  synthetic
atcagctagcaacagaagtaaca

SEQ ID NO: 3956 - DNA, 23 bp, Artificial
  synthetic
agctagcaacagaagtaacaaga

SEQ ID NO: 3957 - DNA, 23 bp, Artificial
  synthetic
gctagcaacagaagtaacaagag

SEQ ID NO: 3958 - DNA, 23 bp, Artificial
  synthetic
acagaagtaacaagagtgattct

SEQ ID NO: 3959 - DNA, 23 bp, Artificial
  synthetic
aaagaagtaacaagagtgattct

SEQ ID NO: 3960 - DNA, 23 bp, Artificial
  synthetic
ttcttgctgctattaccgcttta

SEQ ID NO: 3961 - DNA, 23 bp, Artificial
  synthetic
ttgctgctattaccgctttaaaa

SEQ ID NO: 3962 - DNA, 23 bp, Artificial
  synthetic
cgcccttttactaaacttgacag

SEQ ID NO: 3963 - DNA, 23 bp, Artificial
  synthetic
cccttttactaaacttgacagaa

SEQ ID NO: 3964 - DNA, 23 bp, Artificial
  synthetic
ccttttactaaacttgacagaag

SEQ ID NO: 3965 - DNA, 23 bp, Artificial
  synthetic
tttactaaacttgacagaagttc

SEQ ID NO: 3966 - DNA, 23 bp, Artificial
  synthetic
tactaaacttgacagaagttcag

SEQ ID NO: 3967 - DNA, 23 bp, Artificial
  synthetic
aaacttgacagaagttcagtaaa

SEQ ID NO: 3968 - DNA, 23 bp, Artificial
  synthetic
cttgacagaagttcagtaaattc

SEQ ID NO: 3969 - DNA, 23 bp, Artificial
  synthetic
tgacagaagttcagtaaattctt

SEQ ID NO: 3970 - DNA, 23 bp, Artificial
  synthetic
gacagaagttcagtaaattctta

SEQ ID NO: 3971 - DNA, 23 bp, Artificial
  synthetic
acagaagttcagtaaattcttac

SEQ ID NO: 3972 - DNA, 23 bp, Artificial
  synthetic
cgccaaactgacggattattatt

SEQ ID NO: 3973 - DNA, 23 bp, Artificial
  synthetic
aagttaagggaaaacttttactt

SEQ ID NO: 3974 - DNA, 23 bp, Artificial
  synthetic
agttaagggaaaacttttacttt

SEQ ID NO: 3975 - DNA, 23 bp, Artificial
  synthetic
gttaagggaaaacttttactttg

SEQ ID NO: 3976 - DNA, 23 bp, Artificial
  synthetic
taagggaaaacttttactttgta

SEQ ID NO: 3977 - DNA, 23 bp, Artificial
  synthetic
aagggaaaacttttactttgtag

SEQ ID NO: 3978 - DNA, 23 bp, Artificial
  synthetic
gggaaaacttttactttgtagat

SEQ ID NO: 3979 - DNA, 23 bp, Artificial
  synthetic
ggaaaacttttactttgtagata

SEQ ID NO: 3980 - DNA, 23 bp, Artificial
  synthetic
gaaaaacttttactttgtagata

SEQ ID NO: 3981 - RNA, 21 nt, Artificial
  synthetic
uccgacuuccgguaaagagua

SEQ ID NO: 3982 - RNA, 21 nt, Artificial
  synthetic
ccgacuuccgguaaagaguca

SEQ ID NO: 3983 - RNA, 21 nt, Artificial
  synthetic
cgacuuccgguaaagagucca

SEQ ID NO: 3984 - RNA, 21 nt, Artificial
  synthetic
aaugugaaguacaagugaaaa

SEQ ID NO: 3985 - RNA, 21 nt, Artificial
  synthetic
augugaaguacaagugaaaaa

SEQ ID NO: 3986 - RNA, 21 nt, Artificial
  synthetic
gugaaguacaagugaaaaaua

SEQ ID NO: 3987 - RNA, 21 nt, Artificial
  synthetic
caugagaaaaguacagaauca

SEQ ID NO: 3988 - RNA, 21 nt, Artificial
  synthetic
cacuucucacacuucagauua

SEQ ID NO: 3989 - RNA, 21 nt, Artificial
  synthetic
acuucucacacuucagauuua

SEQ ID NO: 3990 - RNA, 21 nt, Artificial
  synthetic
cuucucacacuucagauuuca

SEQ ID NO: 3991 - RNA, 21 nt, Artificial
  synthetic
uucucacacuucagauuucaa

SEQ ID NO: 3992 - RNA, 21 nt, Artificial
  synthetic
ucucacacuucagauuucaaa

SEQ ID NO: 3993 - RNA, 21 nt, Artificial
  synthetic
cucacacuucagauuucaaca

SEQ ID NO: 3994 - RNA, 21 nt, Artificial
  synthetic
ucacacuucagauuucaacca

SEQ ID NO: 3995 - RNA, 21 nt, Artificial
  synthetic
cacacuucagauuucaaccca

SEQ ID NO: 3996 - RNA, 21 nt, Artificial
  synthetic
acuucagauuucaacccgaaa

SEQ ID NO: 3997 - RNA, 21 nt, Artificial
  synthetic
ucagaccaaagaguaguuaaa

SEQ ID NO: 3998 - RNA, 21 nt, Artificial
  synthetic
cagaccaaagaguaguuaaua

SEQ ID NO: 3999 - RNA, 21 nt, Artificial
  synthetic
cucuacuaugccuaaacgcaa

SEQ ID NO: 4000 - RNA, 21 nt, Artificial
  synthetic
ucuacuaugccuaaacgcaua

SEQ ID NO: 4001 - RNA, 21 nt, Artificial
  synthetic
uacuaugccuaaacgcaugua

SEQ ID NO: 4002 - RNA, 21 nt, Artificial
  synthetic
cuucugaaucuauggaucaaa

SEQ ID NO: 4003 - RNA, 21 nt, Artificial
  synthetic
uucugaaucuauggaucaaca

SEQ ID NO: 4004 - RNA, 21 nt, Artificial
  synthetic
ucugaaucuauggaucaacua

SEQ ID NO: 4005 - RNA, 21 nt, Artificial
  synthetic
cugaaucuauggaucaacuaa

SEQ ID NO: 4006 - RNA, 21 nt, Artificial
  synthetic
ugaaucuauggaucaacuaca

SEQ ID NO: 4007 - RNA, 21 nt, Artificial
  synthetic
gaaucuauggaucaacuacua

SEQ ID NO: 4008 - RNA, 21 nt, Artificial
  synthetic
aaucuauggaucaacuacuaa

SEQ ID NO: 4009 - RNA, 21 nt, Artificial
  synthetic
aucuauggaucaacuacuaaa

SEQ ID NO: 4010 - RNA, 21 nt, Artificial
  synthetic
uauacccaauaccuaugacga

SEQ ID NO: 4011 - RNA, 21 nt, Artificial
  synthetic
gacauauagagcaguaccaaa

SEQ ID NO: 4012 - RNA, 21 nt, Artificial
  synthetic
auauagagcaguaccaaauaa

SEQ ID NO: 4013 - RNA, 21 nt, Artificial
  synthetic
uauagagcaguaccaaauaua

SEQ ID NO: 4014 - RNA, 21 nt, Artificial
  synthetic
auagagcaguaccaaauauga

SEQ ID NO: 4015 - RNA, 21 nt, Artificial
  synthetic
agagcaguaccaaauaugcca

SEQ ID NO: 4016 - RNA, 21 nt, Artificial
  synthetic
ugucccaaauuaccauacaaa

SEQ ID NO: 4017 - RNA, 21 nt, Artificial
  synthetic
ucccaaauuaccauacaacaa

SEQ ID NO: 4018 - RNA, 21 nt, Artificial
  synthetic
aagcccuucuuucuacuuuga

SEQ ID NO: 4019 - RNA, 21 nt, Artificial
  synthetic
cccuucuuucuacuuugccaa

SEQ ID NO: 4020 - RNA, 21 nt, Artificial
  synthetic
ccuucuuucuacuuugccaua

SEQ ID NO: 4021 - RNA, 21 nt, Artificial
  synthetic
cuucuuucuacuuugccauua

SEQ ID NO: 4022 - RNA, 21 nt, Artificial
  synthetic
uucuuucuacuuugccauuua

SEQ ID NO: 4023 - RNA, 21 nt, Artificial
  synthetic
ucuuucuacuuugccauuuca

SEQ ID NO: 4024 - RNA, 21 nt, Artificial
  synthetic
cuuucuacuuugccauuucca

SEQ ID NO: 4025 - RNA, 21 nt, Artificial
  synthetic
uuucuacuuugccauuuccaa

SEQ ID NO: 4026 - RNA, 21 nt, Artificial
  synthetic
uucuacuuugccauuuccaca

SEQ ID NO: 4027 - RNA, 21 nt, Artificial
  synthetic
cauguacagucaggaauggua

SEQ ID NO: 4028 - RNA, 21 nt, Artificial
  synthetic
auguacagucaggaaugguua

SEQ ID NO: 4029 - RNA, 21 nt, Artificial
  synthetic
uguacagucaggaaugguuca

SEQ ID NO: 4030 - RNA, 21 nt, Artificial
  synthetic
caggaaugguuccuucucaua

SEQ ID NO: 4031 - RNA, 21 nt, Artificial
  synthetic
gaaugguuccuucucauccaa

SEQ ID NO: 4032 - RNA, 21 nt, Artificial
  synthetic
augguuccuucucauccaaca

SEQ ID NO: 4033 - RNA, 21 nt, Artificial
  synthetic
ugguuccuucucauccaacua

SEQ ID NO: 4034 - RNA, 21 nt, Artificial
  synthetic
guuccuucucauccaacugca

SEQ ID NO: 4035 - RNA, 21 nt, Artificial
  synthetic
caugcgccaaugaugcuaaua

SEQ ID NO: 4036 - RNA, 21 nt, Artificial
  synthetic
gcgccaaugaugcuaaugaca

SEQ ID NO: 4037 - RNA, 21 nt, Artificial
  synthetic
gccaaugaugcuaaugacgaa

SEQ ID NO: 4038 - RNA, 21 nt, Artificial
  synthetic
ccaaugaugcuaaugacgaca

SEQ ID NO: 4039 - RNA, 21 nt, Artificial
  synthetic
augaugcuaaugacgacacaa

SEQ ID NO: 4040 - RNA, 21 nt, Artificial
  synthetic
ugaugcuaaugacgacacaga

SEQ ID NO: 4041 - RNA, 21 nt, Artificial
  synthetic
cgcucaaagugcacuacagca

SEQ ID NO: 4042 - RNA, 21 nt, Artificial
  synthetic
agcccauuccagucucgacaa

SEQ ID NO: 4043 - RNA, 21 nt, Artificial
  synthetic
cccauuccagucucgacaaca

SEQ ID NO: 4044 - RNA, 21 nt, Artificial
  synthetic
caccaccaacagcaguuguaa

SEQ ID NO: 4045 - RNA, 21 nt, Artificial
  synthetic
accaccaacagcaguuguaaa

SEQ ID NO: 4046 - RNA, 21 nt, Artificial
  synthetic
ccaccaacagcaguuguaaga

SEQ ID NO: 4047 - RNA, 21 nt, Artificial
  synthetic
accaacagcaguuguaaggca

SEQ ID NO: 4048 - RNA, 21 nt, Artificial
  synthetic
caacagcaguuguaaggcuga

SEQ ID NO: 4049 - RNA, 21 nt, Artificial
  synthetic
cuucuacugcuucuaccaaca

SEQ ID NO: 4050 - RNA, 21 nt, Artificial
  synthetic
ucuacugcuucuaccaacuga

SEQ ID NO: 4051 - RNA, 21 nt, Artificial
  synthetic
cuacugcuucuaccaacugga

SEQ ID NO: 4052 - RNA, 21 nt, Artificial
  synthetic
cugcuucuaccaacuggaaga

SEQ ID NO: 4053 - RNA, 21 nt, Artificial
  synthetic
caacuggaagcacagaaaaca

SEQ ID NO: 4054 - RNA, 21 nt, Artificial
  synthetic
uugauuucuuguaacauccaa

SEQ ID NO: 4055 - RNA, 21 nt, Artificial
  synthetic
auuucuuguaacauccaauaa

SEQ ID NO: 4056 - RNA, 21 nt, Artificial
  synthetic
uucuuguaacauccaauagga

SEQ ID NO: 4057 - RNA, 21 nt, Artificial
  synthetic
ucuuguaacauccaauaggaa

SEQ ID NO: 4058 - RNA, 21 nt, Artificial
  synthetic
uguaacauccaauaggaauga

SEQ ID NO: 4059 - RNA, 21 nt, Artificial
  synthetic
uaacauccaauaggaaugcua

SEQ ID NO: 4060 - RNA, 21 nt, Artificial
  synthetic
aacauccaauaggaaugcuaa

SEQ ID NO: 4061 - RNA, 21 nt, Artificial
  synthetic
acauccaauaggaaugcuaaa

SEQ ID NO: 4062 - RNA, 21 nt, Artificial
  synthetic
cauccaauaggaaugcuaaca

SEQ ID NO: 4063 - RNA, 21 nt, Artificial
  synthetic
aauaggaaugcuaacaguuca

SEQ ID NO: 4064 - RNA, 21 nt, Artificial
  synthetic
auaggaaugcuaacaguucaa

SEQ ID NO: 4065 - RNA, 21 nt, Artificial
  synthetic
uaggaaugcuaacaguucaca

SEQ ID NO: 4066 - RNA, 21 nt, Artificial
  synthetic
aggaaugcuaacaguucacua

SEQ ID NO: 4067 - RNA, 21 nt, Artificial
  synthetic
ggaaugcuaacaguucacuua

SEQ ID NO: 4068 - RNA, 21 nt, Artificial
  synthetic
gaaugcuaacaguucacuuga

SEQ ID NO: 4069 - RNA, 21 nt, Artificial
  synthetic
gcuaacaguucacuugcagua

SEQ ID NO: 4070 - RNA, 21 nt, Artificial
  synthetic
caguucacuugcaguggaaga

SEQ ID NO: 4071 - RNA, 21 nt, Artificial
  synthetic
gaccgaguagaggcauuuaga

SEQ ID NO: 4072 - RNA, 21 nt, Artificial
  synthetic
accgaguagaggcauuuagga

SEQ ID NO: 4073 - RNA, 21 nt, Artificial
  synthetic
ggcuauuccauaauuccauaa

SEQ ID NO: 4074 - RNA, 21 nt, Artificial
  synthetic
ugccgaaacuggaaguuauua

SEQ ID NO: 4075 - RNA, 21 nt, Artificial
  synthetic
ccgaaacuggaaguuauuuaa

SEQ ID NO: 4076 - RNA, 21 nt, Artificial
  synthetic
cgaaacuggaaguuauuuaua

SEQ ID NO: 4077 - RNA, 21 nt, Artificial
  synthetic
gaaacuggaaguuauuuauua

SEQ ID NO: 4078 - RNA, 21 nt, Artificial
  synthetic
aaacuggaaguuauuuauuua

SEQ ID NO: 4079 - RNA, 21 nt, Artificial
  synthetic
uaauaacccuugaaagucaua

SEQ ID NO: 4080 - RNA, 21 nt, Artificial
  synthetic
aauaacccuugaaagucauga

SEQ ID NO: 4081 - RNA, 21 nt, Artificial
  synthetic
aacccuugaaagucaugaaca

SEQ ID NO: 4082 - RNA, 21 nt, Artificial
  synthetic
cuugaaagucaugaacacaua

SEQ ID NO: 4083 - RNA, 21 nt, Artificial
  synthetic
agucaugaacacaucagcuaa

SEQ ID NO: 4084 - RNA, 21 nt, Artificial
  synthetic
gucaugaacacaucagcuaga

SEQ ID NO: 4085 - RNA, 21 nt, Artificial
  synthetic
ucaugaacacaucagcuagca

SEQ ID NO: 4086 - RNA, 21 nt, Artificial
  synthetic
caugaacacaucagcuagcaa

SEQ ID NO: 4087 - RNA, 21 nt, Artificial
  synthetic
caugaacacaucagcuagcaa

SEQ ID NO: 4088 - RNA, 21 nt, Artificial
  synthetic
augaacacaucagcuagcaaa

SEQ ID NO: 4089 - RNA, 21 nt, Artificial
  synthetic
ugaacacaucagcuagcaaaa

SEQ ID NO: 4090 - RNA, 21 nt, Artificial
  synthetic
gaacacaucagcuagcaaaaa

SEQ ID NO: 4091 - RNA, 21 nt, Artificial
  synthetic
aacacaucagcuagcaaaaga

SEQ ID NO: 4092 - RNA, 21 nt, Artificial
  synthetic
caucagcuagcaaaagaagua

SEQ ID NO: 4093 - RNA, 21 nt, Artificial
  synthetic
cuagcaaaagaaguaacaaga

SEQ ID NO: 4094 - RNA, 21 nt, Artificial
  synthetic
guaacaagagugauucuugca

SEQ ID NO: 4095 - RNA, 21 nt, Artificial
  synthetic
uaacaagagugauucuugcua

SEQ ID NO: 4096 - RNA, 21 nt, Artificial
  synthetic
aacaagagugauucuugcuga

SEQ ID NO: 4097 - RNA, 21 nt, Artificial
  synthetic
agagugauucuugcugcuaua

SEQ ID NO: 4098 - RNA, 21 nt, Artificial
  synthetic
gagugauucuugcugcuauua

SEQ ID NO: 4099 - RNA, 21 nt, Artificial
  synthetic
gugauucuugcugcuauuaca

SEQ ID NO: 4100 - RNA, 21 nt, Artificial
  synthetic
uuggaacgcccuuuuacuaaa

SEQ ID NO: 4101 - RNA, 21 nt, Artificial
  synthetic
uggaacgcccuuuuacuaaaa

SEQ ID NO: 4102 - RNA, 21 nt, Artificial
  synthetic
gaacgcccuuuuacuaaacua

SEQ ID NO: 4103 - RNA, 21 nt, Artificial
  synthetic
aacgcccuuuuacuaaacuua

SEQ ID NO: 4104 - RNA, 21 nt, Artificial
  synthetic
acgcccuuuuacuaaacuuga

SEQ ID NO: 4105 - RNA, 21 nt, Artificial
  synthetic
cgcccuuuuacuaaacuugaa

SEQ ID NO: 4106 - RNA, 21 nt, Artificial
  synthetic
guuucaguaaauucuuaccga

SEQ ID NO: 4107 - RNA, 21 nt, Artificial
  synthetic
uuucaguaaauucuuaccgua

SEQ ID NO: 4108 - RNA, 21 nt, Artificial
  synthetic
uucaguaaauucuuaccguca

SEQ ID NO: 4109 - RNA, 21 nt, Artificial
  synthetic
ucaguaaauucuuaccgucaa

SEQ ID NO: 4110 - RNA, 21 nt, Artificial
  synthetic
caguaaauucuuaccgucaaa

SEQ ID NO: 4111 - RNA, 21 nt, Artificial
  synthetic
aguaaauucuuaccgucaaaa

SEQ ID NO: 4112 - RNA, 21 nt, Artificial
  synthetic
guaaauucuuaccgucaaaca

SEQ ID NO: 4113 - RNA, 21 nt, Artificial
  synthetic
uaaauucuuaccgucaaacua

SEQ ID NO: 4114 - RNA, 21 nt, Artificial
  synthetic
aaauucuuaccgucaaacuga

SEQ ID NO: 4115 - RNA, 21 nt, Artificial
  synthetic
aauucuuaccgucaaacugaa

SEQ ID NO: 4116 - RNA, 21 nt, Artificial
  synthetic
auucuuaccgucaaacugaca

SEQ ID NO: 4117 - RNA, 21 nt, Artificial
  synthetic
uucuuaccgucaaacugacga

SEQ ID NO: 4118 - RNA, 21 nt, Artificial
  synthetic
ucuuaccgucaaacugacgga

SEQ ID NO: 4119 - RNA, 21 nt, Artificial
  synthetic
cuuaccgucaaacugacggaa

SEQ ID NO: 4120 - RNA, 21 nt, Artificial
  synthetic
uuaccgucaaacugacggaua

SEQ ID NO: 4121 - RNA, 21 nt, Artificial
  synthetic
uaccgucaaacugacggauua

SEQ ID NO: 4122 - RNA, 21 nt, Artificial
  synthetic
uaccgucaaacugacggauua

SEQ ID NO: 4123 - RNA, 21 nt, Artificial
  synthetic
accgucaaacugacggauuaa

SEQ ID NO: 4124 - RNA, 21 nt, Artificial
  synthetic
aacugacggauuauuauuuaa

SEQ ID NO: 4125 - RNA, 21 nt, Artificial
  synthetic
aguuugaugaggugaucacua

SEQ ID NO: 4126 - RNA, 21 nt, Artificial
  synthetic
acugucuacagugguucaaca

SEQ ID NO: 4127 - RNA, 21 nt, Artificial
  synthetic
cugucuacagugguucaacua

SEQ ID NO: 4128 - RNA, 21 nt, Artificial
  synthetic
cuacagugguucaacuuuuaa

SEQ ID NO: 4129 - RNA, 21 nt, Artificial
  synthetic
uacagugguucaacuuuuaaa

SEQ ID NO: 4130 - RNA, 21 nt, Artificial
  synthetic
ucaacuuuuaaguuaagggaa

SEQ ID NO: 4131 - RNA, 21 nt, Artificial
  synthetic
aacuuuuaaguuaagggaaaa

SEQ ID NO: 4132 - RNA, 21 nt, Artificial
  synthetic
aaaaacuuuuacuuuguagaa

SEQ ID NO: 4133 - RNA, 21 nt, Artificial
  synthetic
cucagucuacgauuucuuuua

SEQ ID NO: 4134 - RNA, 21 nt, Artificial
  synthetic
ucagucuacgauuucuuuuga

SEQ ID NO: 4135 - RNA, 21 nt, Artificial
  synthetic
cagucuacgauuucuuuugaa

SEQ ID NO: 4136 - RNA, 21 nt, Artificial
  synthetic
caugagaaaaguacagaauca

SEQ ID NO: 4137 - RNA, 21 nt, Artificial
  synthetic
caugagaaaaguacagaauca

SEQ ID NO: 4138 - RNA, 21 nt, Artificial
  synthetic
aaauguucagacuuuguugua

SEQ ID NO: 4139 - RNA, 21 nt, Artificial
  synthetic
ugcuaucagugcuaaagugaa

SEQ ID NO: 4140 - RNA, 21 nt, Artificial
  synthetic
cguaugauagcaguuuaucua

SEQ ID NO: 4141 - RNA, 21 nt, Artificial
  synthetic
guaugauagcaguuuaucuua

SEQ ID NO: 4142 - RNA, 21 nt, Artificial
  synthetic
gauaacucagaagaauuuuua

SEQ ID NO: 4143 - RNA, 21 nt, Artificial
  synthetic
auccacuucucacacuucaga

SEQ ID NO: 4144 - RNA, 21 nt, Artificial
  synthetic
ucucacacuucagauuucaaa

SEQ ID NO: 4145 - RNA, 21 nt, Artificial
  synthetic
cucuacuaugccuaaacgcaa

SEQ ID NO: 4146 - RNA, 21 nt, Artificial
  synthetic
ucuacuaugccuaaacgcaua

SEQ ID NO: 4147 - RNA, 21 nt, Artificial
  synthetic
ucgaaaucacagaguuucuga

SEQ ID NO: 4148 - RNA, 21 nt, Artificial
  synthetic
cgaaaucacagaguuucugca

SEQ ID NO: 4149 - RNA, 21 nt, Artificial
  synthetic
guucuacuucugaaucuauga

SEQ ID NO: 4150 - RNA, 21 nt, Artificial
  synthetic
uucuacuucugaaucuaugga

SEQ ID NO: 4151 - RNA, 21 nt, Artificial
  synthetic
ucuacuucugaaucuauggaa

SEQ ID NO: 4152 - RNA, 21 nt, Artificial
  synthetic
cuacuucugaaucuauggaua

SEQ ID NO: 4153 - RNA, 21 nt, Artificial
  synthetic
ugaaucuauggaucaacuaca

SEQ ID NO: 4154 - RNA, 21 nt, Artificial
  synthetic
ugaaucuauggaucaacuaca

SEQ ID NO: 4155 - RNA, 21 nt, Artificial
  synthetic
acuacuaaacaaaaauagaga

SEQ ID NO: 4156 - RNA, 21 nt, Artificial
  synthetic
accaagugcuaaggauucuua

SEQ ID NO: 4157 - RNA, 21 nt, Artificial
  synthetic
uuaggaaaucaacauugaaua

SEQ ID NO: 4158 - RNA, 21 nt, Artificial
  synthetic
agccaacuccaguuuauacua

SEQ ID NO: 4159 - RNA, 21 nt, Artificial
  synthetic
uucuucagcaacucaguacga

SEQ ID NO: 4160 - RNA, 21 nt, Artificial
  synthetic
uuucuacuuugccauuuccaa

SEQ ID NO: 4161 - RNA, 21 nt, Artificial
  synthetic
uucuacuuugccauuuccaca

SEQ ID NO: 4162 - RNA, 21 nt, Artificial
  synthetic
ucuuguaacauccaauaggaa

SEQ ID NO: 4163 - RNA, 21 nt, Artificial
  synthetic
ccgaaacuggaaguuauuuaa

SEQ ID NO: 4164 - RNA, 21 nt, Artificial
  synthetic
ccgaaacuggaaguuauuuaa

SEQ ID NO: 4165 - RNA, 21 nt, Artificial
  synthetic
ccgaaacuggaaguuauuuaa

SEQ ID NO: 4166 - RNA, 21 nt, Artificial
  synthetic
aaacuggaaguuauuuauuua

SEQ ID NO: 4167 - RNA, 21 nt, Artificial
  synthetic
cuugaaagucaugaacacaua

SEQ ID NO: 4168 - RNA, 21 nt, Artificial
  synthetic
cuugaaagucaugaacacaua

SEQ ID NO: 4169 - RNA, 21 nt, Artificial
  synthetic
agucaugaacacaucagcuaa

SEQ ID NO: 4170 - RNA, 21 nt, Artificial
  synthetic
agucaugaacacaucagcuaa

SEQ ID NO: 4171 - RNA, 21 nt, Artificial
  synthetic
agucaugaacacaucagcuaa

SEQ ID NO: 4172 - RNA, 21 nt, Artificial
  synthetic
gucaugaacacaucagcuaga

SEQ ID NO: 4173 - RNA, 21 nt, Artificial
  synthetic
gucaugaacacaucagcuaga

SEQ ID NO: 4174 - RNA, 21 nt, Artificial
  synthetic
caugaacacaucagcuagcaa

SEQ ID NO: 4175 - RNA, 21 nt, Artificial
  synthetic
agagugauucuugcugcuaua

SEQ ID NO: 4176 - RNA, 21 nt, Artificial
  synthetic
agagugauucuugcugcuaua

SEQ ID NO: 4177 - RNA, 21 nt, Artificial
  synthetic
gugauucuugcugcuauuaca

SEQ ID NO: 4178 - RNA, 21 nt, Artificial
  synthetic
gugauucuugcugcuauuaca

SEQ ID NO: 4179 - RNA, 21 nt, Artificial
  synthetic
cgcccuuuuacuaaacuugaa

SEQ ID NO: 4180 - RNA, 21 nt, Artificial
  synthetic
cgcccuuuuacuaaacuugaa

SEQ ID NO: 4181 - RNA, 21 nt, Artificial
  synthetic
uaccgucaaacugacggauua

SEQ ID NO: 4182 - RNA, 21 nt, Artificial
  synthetic
acugucuacagugguucaaca

SEQ ID NO: 4183 - RNA, 21 nt, Artificial
  synthetic
acugucuacagugguucaaca

SEQ ID NO: 4184 - RNA, 21 nt, Artificial
  synthetic
agugguucaacuuuuaaguua

SEQ ID NO: 4185 - RNA, 21 nt, Artificial
  synthetic
gugguucaacuuuuaaguuaa

SEQ ID NO: 4186 - RNA, 21 nt, Artificial
  synthetic
uaagggaaaaacuuuuacuua

SEQ ID NO: 4187 - RNA, 21 nt, Artificial
  synthetic
ccucagccuacgauuucuuua

SEQ ID NO: 4188 - RNA, 21 nt, Artificial
  synthetic
cucagccuacgauuucuuuua

SEQ ID NO: 4189 - RNA, 21 nt, Artificial
  synthetic
ucagccuacgauuucuuuuga

SEQ ID NO: 4190 - RNA, 21 nt, Artificial
  synthetic
gaggaugguucauauacuuaa

SEQ ID NO: 4191 - RNA, 21 nt, Artificial
  synthetic
gaggaugguucauauacuuaa

SEQ ID NO: 4192 - RNA, 21 nt, Artificial
  synthetic
aggaugguucauauacuuaca

SEQ ID NO: 4193 - RNA, 21 nt, Artificial
  synthetic
aaugugaaguacaagugaaaa

SEQ ID NO: 4194 - RNA, 21 nt, Artificial
  synthetic
aaugugaaguacaagugaaaa

SEQ ID NO: 4195 - RNA, 21 nt, Artificial
  synthetic
gugaaguacaagugaaaaaca

SEQ ID NO: 4196 - RNA, 21 nt, Artificial
  synthetic
aaggaguuuuuaaaacauaca

SEQ ID NO: 4197 - RNA, 21 nt, Artificial
  synthetic
aggaguuuuuaaaacauacaa

SEQ ID NO: 4198 - RNA, 21 nt, Artificial
  synthetic
aaacauacaguccuaagugua

SEQ ID NO: 4199 - RNA, 21 nt, Artificial
  synthetic
aacauacaguccuaaguguga

SEQ ID NO: 4200 - RNA, 21 nt, Artificial
  synthetic
acauacaguccuaagugugaa

SEQ ID NO: 4201 - RNA, 21 nt, Artificial
  synthetic
gcugcacaugagaaaaguaca

SEQ ID NO: 4202 - RNA, 21 nt, Artificial
  synthetic
cugcacaugagaaaaguacaa

SEQ ID NO: 4203 - RNA, 21 nt, Artificial
  synthetic
auggagaguguuuuguucaaa

SEQ ID NO: 4204 - RNA, 21 nt, Artificial
  synthetic
ggagaguguuuuguucaaaua

SEQ ID NO: 4205 - RNA, 21 nt, Artificial
  synthetic
uuuguucaaaugcucagacua

SEQ ID NO: 4206 - RNA, 21 nt, Artificial
  synthetic
uguucaaaugcucagacuuca

SEQ ID NO: 4207 - RNA, 21 nt, Artificial
  synthetic
guucaaaugcucagacuucga

SEQ ID NO: 4208 - RNA, 21 nt, Artificial
  synthetic
uucaaaugcucagacuucgua

SEQ ID NO: 4209 - RNA, 21 nt, Artificial
  synthetic
ucaaaugcucagacuucguua

SEQ ID NO: 4210 - RNA, 21 nt, Artificial
  synthetic
caaaugcucagacuucguuga

SEQ ID NO: 4211 - RNA, 21 nt, Artificial
  synthetic
aaaugcucagacuucguugua

SEQ ID NO: 4212 - RNA, 21 nt, Artificial
  synthetic
aaugcucagacuucguuguga

SEQ ID NO: 4213 - RNA, 21 nt, Artificial
  synthetic
acauguuucgauauaaugaaa

SEQ ID NO: 4214 - RNA, 21 nt, Artificial
  synthetic
uuuaucuucauauacgguuca

SEQ ID NO: 4215 - RNA, 21 nt, Artificial
  synthetic
agggacaacucagaagaauua

SEQ ID NO: 4216 - RNA, 21 nt, Artificial
  synthetic
gggacaacucagaagaauuua

SEQ ID NO: 4217 - RNA, 21 nt, Artificial
  synthetic
ggacaacucagaagaauuuca

SEQ ID NO: 4218 - RNA, 21 nt, Artificial
  synthetic
gacaacucagaagaauuucua

SEQ ID NO: 4219 - RNA, 21 nt, Artificial
  synthetic
ugcuucucacacuucagauua

SEQ ID NO: 4220 - RNA, 21 nt, Artificial
  synthetic
gcuucucacacuucagauuua

SEQ ID NO: 4221 - RNA, 21 nt, Artificial
  synthetic
cuucucacacuucagauuuca

SEQ ID NO: 4222 - RNA, 21 nt, Artificial
  synthetic
cuucucacacuucagauuuca

SEQ ID NO: 4223 - RNA, 21 nt, Artificial
  synthetic
uucucacacuucagauuucaa

SEQ ID NO: 4224 - RNA, 21 nt, Artificial
  synthetic
uucucacacuucagauuucaa

SEQ ID NO: 4225 - RNA, 21 nt, Artificial
  synthetic
ucagaccaaagaguaguuaaa

SEQ ID NO: 4226 - RNA, 21 nt, Artificial
  synthetic
ucagaccaaagaguaguuaaa

SEQ ID NO: 4227 - RNA, 21 nt, Artificial
  synthetic
cagaccaaagaguaguuaaua

SEQ ID NO: 4228 - RNA, 21 nt, Artificial
  synthetic
cagaccaaagaguaguuaaua

SEQ ID NO: 4229 - RNA, 21 nt, Artificial
  synthetic
uagaauuuguaucccacaaua

SEQ ID NO: 4230 - RNA, 21 nt, Artificial
  synthetic
agaauuuguaucccacaauca

SEQ ID NO: 4231 - RNA, 21 nt, Artificial
  synthetic
gaauuuguaucccacaaucca

SEQ ID NO: 4232 - RNA, 21 nt, Artificial
  synthetic
gugaaacaucaccuagcuuua

SEQ ID NO: 4233 - RNA, 21 nt, Artificial
  synthetic
ugaaacaucaccuagcuuuua

SEQ ID NO: 4234 - RNA, 21 nt, Artificial
  synthetic
gaaacaucaccuagcuuuuca

SEQ ID NO: 4235 - RNA, 21 nt, Artificial
  synthetic
aaacaucaccuagcuuuucaa

SEQ ID NO: 4236 - RNA, 21 nt, Artificial
  synthetic
aacaucaccuagcuuuucaaa

SEQ ID NO: 4237 - RNA, 21 nt, Artificial
  synthetic
acaucaccuagcuuuucaaaa

SEQ ID NO: 4238 - RNA, 21 nt, Artificial
  synthetic
caucaccuagcuuuucaaaaa

SEQ ID NO: 4239 - RNA, 21 nt, Artificial
  synthetic
aucaccuagcuuuucaaaaga

SEQ ID NO: 4240 - RNA, 21 nt, Artificial
  synthetic
ucaccuagcuuuucaaaagca

SEQ ID NO: 4241 - RNA, 21 nt, Artificial
  synthetic
caccuagcuuuucaaaagcua

SEQ ID NO: 4242 - RNA, 21 nt, Artificial
  synthetic
accuagcuuuucaaaagcuga

SEQ ID NO: 4243 - RNA, 21 nt, Artificial
  synthetic
ccuagcuuuucaaaagcugaa

SEQ ID NO: 4244 - RNA, 21 nt, Artificial
  synthetic
caucugaaucuauggaucaaa

SEQ ID NO: 4245 - RNA, 21 nt, Artificial
  synthetic
aucugaaucuauggaucaaca

SEQ ID NO: 4246 - RNA, 21 nt, Artificial
  synthetic
ucugaaucuauggaucaacua

SEQ ID NO: 4247 - RNA, 21 nt, Artificial
  synthetic
ucugaaucuauggaucaacua

SEQ ID NO: 4248 - RNA, 21 nt, Artificial
  synthetic
cugaaucuauggaucaacuaa

SEQ ID NO: 4249 - RNA, 21 nt, Artificial
  synthetic
cugaaucuauggaucaacuaa

SEQ ID NO: 4250 - RNA, 21 nt, Artificial
  synthetic
aucuauggaucaacuacuaaa

SEQ ID NO: 4251 - RNA, 21 nt, Artificial
  synthetic
ucuauggaucaacuacuaaga

SEQ ID NO: 4252 - RNA, 21 nt, Artificial
  synthetic
cuauggaucaacuacuaagca

SEQ ID NO: 4253 - RNA, 21 nt, Artificial
  synthetic
uauggaucaacuacuaagcaa

SEQ ID NO: 4254 - RNA, 21 nt, Artificial
  synthetic
auggaucaacuacuaagcaaa

SEQ ID NO: 4255 - RNA, 21 nt, Artificial
  synthetic
uggaucaacuacuaagcaaaa

SEQ ID NO: 4256 - RNA, 21 nt, Artificial
  synthetic
ggaucaacuacuaagcaaaaa

SEQ ID NO: 4257 - RNA, 21 nt, Artificial
  synthetic
gaucaacuacuaagcaaaaaa

SEQ ID NO: 4258 - RNA, 21 nt, Artificial
  synthetic
aaggagaaaagucacgagaua

SEQ ID NO: 4259 - RNA, 21 nt, Artificial
  synthetic
ggaguucaacccucguucuua

SEQ ID NO: 4260 - RNA, 21 nt, Artificial
  synthetic
guucaacccucguucuuucua

SEQ ID NO: 4261 - RNA, 21 nt, Artificial
  synthetic
uucaacccucguucuuucuca

SEQ ID NO: 4262 - RNA, 21 nt, Artificial
  synthetic
ucaacccucguucuuucucua

SEQ ID NO: 4263 - RNA, 21 nt, Artificial
  synthetic
caacccucguucuuucucuca

SEQ ID NO: 4264 - RNA, 21 nt, Artificial
  synthetic
aacccucguucuuucucucaa

SEQ ID NO: 4265 - RNA, 21 nt, Artificial
  synthetic
cguucuuucucucagccaaaa

SEQ ID NO: 4266 - RNA, 21 nt, Artificial
  synthetic
guucuuucucucagccaaaga

SEQ ID NO: 4267 - RNA, 21 nt, Artificial
  synthetic
aguccugucauacaagguaaa

SEQ ID NO: 4268 - RNA, 21 nt, Artificial
  synthetic
guccugucauacaagguaaua

SEQ ID NO: 4269 - RNA, 21 nt, Artificial
  synthetic
ugucauacaagguaaugccaa

SEQ ID NO: 4270 - RNA, 21 nt, Artificial
  synthetic
gucauacaagguaaugccaga

SEQ ID NO: 4271 - RNA, 21 nt, Artificial
  synthetic
ucuacuuugccauuuccacca

SEQ ID NO: 4272 - RNA, 21 nt, Artificial
  synthetic
aagcacagaaaacuagaacua

SEQ ID NO: 4273 - RNA, 21 nt, Artificial
  synthetic
gcacagaaaacuagaacuuca

SEQ ID NO: 4274 - RNA, 21 nt, Artificial
  synthetic
acagaaaacuagaacuucaua

SEQ ID NO: 4275 - RNA, 21 nt, Artificial
  synthetic
cagaaaacuagaacuucauua

SEQ ID NO: 4276 - RNA, 21 nt, Artificial
  synthetic
ugcuugcugaaacuggaagua

SEQ ID NO: 4277 - RNA, 21 nt, Artificial
  synthetic
cugaaacuggaaguuauuuaa

SEQ ID NO: 4278 - RNA, 21 nt, Artificial
  synthetic
ugaaacuggaaguuauuuaua

SEQ ID NO: 4279 - RNA, 21 nt, Artificial
  synthetic
gaaacuggaaguuauuuauua

SEQ ID NO: 4280 - RNA, 21 nt, Artificial
  synthetic
gaaacuggaaguuauuuauua

SEQ ID NO: 4281 - RNA, 21 nt, Artificial
  synthetic
uugagagucaugaacacauca

SEQ ID NO: 4282 - RNA, 21 nt, Artificial
  synthetic
agucaugaacacaucagcuaa

SEQ ID NO: 4283 - RNA, 21 nt, Artificial
  synthetic
agucaugaacacaucagcuaa

SEQ ID NO: 4284 - RNA, 21 nt, Artificial
  synthetic
gucaugaacacaucagcuaga

SEQ ID NO: 4285 - RNA, 21 nt, Artificial
  synthetic
gucaugaacacaucagcuaga

SEQ ID NO: 4286 - RNA, 21 nt, Artificial
  synthetic
augaacacaucagcuagcaaa

SEQ ID NO: 4287 - RNA, 21 nt, Artificial
  synthetic
ugaacacaucagcuagcaaca

SEQ ID NO: 4288 - RNA, 21 nt, Artificial
  synthetic
aucagcuagcaacagaaguaa

SEQ ID NO: 4289 - RNA, 21 nt, Artificial
  synthetic
cagcuagcaacagaaguaaca

SEQ ID NO: 4290 - RNA, 21 nt, Artificial
  synthetic
cuagcaacagaaguaacaaga

SEQ ID NO: 4291 - RNA, 21 nt, Artificial
  synthetic
uagcaacagaaguaacaagaa

SEQ ID NO: 4292 - RNA, 21 nt, Artificial
  synthetic
agaaguaacaagagugauuca

SEQ ID NO: 4293 - RNA, 21 nt, Artificial
  synthetic
agaaguaacaagagugauuca

SEQ ID NO: 4294 - RNA, 21 nt, Artificial
  synthetic
cuugcugcuauuaccgcuuua

SEQ ID NO: 4295 - RNA, 21 nt, Artificial
  synthetic
gcugcuauuaccgcuuuaaaa

SEQ ID NO: 4296 - RNA, 21 nt, Artificial
  synthetic
cccuuuuacuaaacuugacaa

SEQ ID NO: 4297 - RNA, 21 nt, Artificial
  synthetic
cuuuuacuaaacuugacagaa

SEQ ID NO: 4298 - RNA, 21 nt, Artificial
  synthetic
uuuuacuaaacuugacagaaa

SEQ ID NO: 4299 - RNA, 21 nt, Artificial
  synthetic
uacuaaacuugacagaaguua

SEQ ID NO: 4300 - RNA, 21 nt, Artificial
  synthetic
cuaaacuugacagaaguucaa

SEQ ID NO: 4301 - RNA, 21 nt, Artificial
  synthetic
acuugacagaaguucaguaaa

SEQ ID NO: 4302 - RNA, 21 nt, Artificial
  synthetic
ugacagaaguucaguaaauua

SEQ ID NO: 4303 - RNA, 21 nt, Artificial
  synthetic
acagaaguucaguaaauucua

SEQ ID NO: 4304 - RNA, 21 nt, Artificial
  synthetic
cagaaguucaguaaauucuua

SEQ ID NO: 4305 - RNA, 21 nt, Artificial
  synthetic
agaaguucaguaaauucuuaa

SEQ ID NO: 4306 - RNA, 21 nt, Artificial
  synthetic
ccaaacugacggauuauuaua

SEQ ID NO: 4307 - RNA, 21 nt, Artificial
  synthetic
guuaagggaaaacuuuuacua

SEQ ID NO: 4308 - RNA, 21 nt, Artificial
  synthetic
uuaagggaaaacuuuuacuua

SEQ ID NO: 4309 - RNA, 21 nt, Artificial
  synthetic
uaagggaaaacuuuuacuuua

SEQ ID NO: 4310 - RNA, 21 nt, Artificial
  synthetic
agggaaaacuuuuacuuugua

SEQ ID NO: 4311 - RNA, 21 nt, Artificial
  synthetic
gggaaaacuuuuacuuuguaa

SEQ ID NO: 4312 - RNA, 21 nt, Artificial
  synthetic
gaaaacuuuuacuuuguagaa

SEQ ID NO: 4313 - RNA, 21 nt, Artificial
  synthetic
aaaacuuuuacuuuguagaua

SEQ ID NO: 4314 - RNA, 21 nt, Artificial
  synthetic
aaaacuuuuacuuuguagaua

SEQ ID NO: 4315 - RNA, 23 nt, Artificial
  synthetic
uacucuuuaccggaagucggagg

SEQ ID NO: 4316 - RNA, 23 nt, Artificial
  synthetic
ugacucuuuaccggaagucggag

SEQ ID NO: 4317 - RNA, 23 nt, Artificial
  synthetic
uggacucuuuaccggaagucgga

SEQ ID NO: 4318 - RNA, 23 nt, Artificial
  synthetic
uuuucacuuguacuucacauuug

SEQ ID NO: 4319 - RNA, 23 nt, Artificial
  synthetic
uuuuucacuuguacuucacauuu

SEQ ID NO: 4320 - RNA, 23 nt, Artificial
  synthetic
uauuuuucacuuguacuucacau

SEQ ID NO: 4321 - RNA, 23 nt, Artificial
  synthetic
ugauucuguacuuuucucaugug

SEQ ID NO: 4322 - RNA, 23 nt, Artificial
  synthetic
uaaucugaagugugagaagugga

SEQ ID NO: 4323 - RNA, 23 nt, Artificial
  synthetic
uaaaucugaagugugagaagugg

SEQ ID NO: 4324 - RNA, 23 nt, Artificial
  synthetic
ugaaaucugaagugugagaagug

SEQ ID NO: 4325 - RNA, 23 nt, Artificial
  synthetic
uugaaaucugaagugugagaagu

SEQ ID NO: 4326 - RNA, 23 nt, Artificial
  synthetic
uuugaaaucugaagugugagaag

SEQ ID NO: 4327 - RNA, 23 nt, Artificial
  synthetic
uguugaaaucugaagugugagaa

SEQ ID NO: 4328 - RNA, 23 nt, Artificial
  synthetic
ugguugaaaucugaagugugaga

SEQ ID NO: 4329 - RNA, 23 nt, Artificial
  synthetic
uggguugaaaucugaagugugag

SEQ ID NO: 4330 - RNA, 23 nt, Artificial
  synthetic
uuucggguugaaaucugaagugu

SEQ ID NO: 4331 - RNA, 23 nt, Artificial
  synthetic
uuuaacuacucuuuggucugaac

SEQ ID NO: 4332 - RNA, 23 nt, Artificial
  synthetic
uauuaacuacucuuuggucugaa

SEQ ID NO: 4333 - RNA, 23 nt, Artificial
  synthetic
uugcguuuaggcauaguagagac

SEQ ID NO: 4334 - RNA, 23 nt, Artificial
  synthetic
uaugcguuuaggcauaguagaga

SEQ ID NO: 4335 - RNA, 23 nt, Artificial
  synthetic
uacaugcguuuaggcauaguaga

SEQ ID NO: 4336 - RNA, 23 nt, Artificial
  synthetic
uuugauccauagauucagaagua

SEQ ID NO: 4337 - RNA, 23 nt, Artificial
  synthetic
uguugauccauagauucagaagu

SEQ ID NO: 4338 - RNA, 23 nt, Artificial
  synthetic
uaguugauccauagauucagaag

SEQ ID NO: 4339 - RNA, 23 nt, Artificial
  synthetic
uuaguugauccauagauucagaa

SEQ ID NO: 4340 - RNA, 23 nt, Artificial
  synthetic
uguaguugauccauagauucaga

SEQ ID NO: 4341 - RNA, 23 nt, Artificial
  synthetic
uaguaguugauccauagauucag

SEQ ID NO: 4342 - RNA, 23 nt, Artificial
  synthetic
uuaguaguugauccauagauuca

SEQ ID NO: 4343 - RNA, 23 nt, Artificial
  synthetic
uuuaguaguugauccauagauuc

SEQ ID NO: 4344 - RNA, 23 nt, Artificial
  synthetic
ucgucauagguauuggguauaaa

SEQ ID NO: 4345 - RNA, 23 nt, Artificial
  synthetic
uuugguacugcucuauaugucuu

SEQ ID NO: 4346 - RNA, 23 nt, Artificial
  synthetic
uuauuugguacugcucuauaugu

SEQ ID NO: 4347 - RNA, 23 nt, Artificial
  synthetic
uauauuugguacugcucuauaug

SEQ ID NO: 4348 - RNA, 23 nt, Artificial
  synthetic
ucauauuugguacugcucuauau

SEQ ID NO: 4349 - RNA, 23 nt, Artificial
  synthetic
uggcauauuugguacugcucuau

SEQ ID NO: 4350 - RNA, 23 nt, Artificial
  synthetic
uuuguaugguaauuugggacaug

SEQ ID NO: 4351 - RNA, 23 nt, Artificial
  synthetic
uuguuguaugguaauuugggaca

SEQ ID NO: 4352 - RNA, 23 nt, Artificial
  synthetic
ucaaaguagaaagaagggcuugu

SEQ ID NO: 4353 - RNA, 23 nt, Artificial
  synthetic
uuggcaaaguagaaagaagggcu

SEQ ID NO: 4354 - RNA, 23 nt, Artificial
  synthetic
uauggcaaaguagaaagaagggc

SEQ ID NO: 4355 - RNA, 23 nt, Artificial
  synthetic
uaauggcaaaguagaaagaaggg

SEQ ID NO: 4356 - RNA, 23 nt, Artificial
  synthetic
uaaauggcaaaguagaaagaagg

SEQ ID NO: 4357 - RNA, 23 nt, Artificial
  synthetic
ugaaauggcaaaguagaaagaag

SEQ ID NO: 4358 - RNA, 23 nt, Artificial
  synthetic
uggaaauggcaaaguagaaagaa

SEQ ID NO: 4359 - RNA, 23 nt, Artificial
  synthetic
uuggaaauggcaaaguagaaaga

SEQ ID NO: 4360 - RNA, 23 nt, Artificial
  synthetic
uguggaaauggcaaaguagaaag

SEQ ID NO: 4361 - RNA, 23 nt, Artificial
  synthetic
uaccauuccugacuguacaugag

SEQ ID NO: 4362 - RNA, 23 nt, Artificial
  synthetic
uaaccauuccugacuguacauga

SEQ ID NO: 4363 - RNA, 23 nt, Artificial
  synthetic
ugaaccauuccugacuguacaug

SEQ ID NO: 4364 - RNA, 23 nt, Artificial
  synthetic
uaugagaaggaaccauuccugac

SEQ ID NO: 4365 - RNA, 23 nt, Artificial
  synthetic
uuggaugagaaggaaccauuccu

SEQ ID NO: 4366 - RNA, 23 nt, Artificial
  synthetic
uguuggaugagaaggaaccauuc

SEQ ID NO: 4367 - RNA, 23 nt, Artificial
  synthetic
uaguuggaugagaaggaaccauu

SEQ ID NO: 4368 - RNA, 23 nt, Artificial
  synthetic
ugcaguuggaugagaaggaacca

SEQ ID NO: 4369 - RNA, 23 nt, Artificial
  synthetic
uauuagcaucauuggcgcauggg

SEQ ID NO: 4370 - RNA, 23 nt, Artificial
  synthetic
ugucauuagcaucauuggcgcau

SEQ ID NO: 4371 - RNA, 23 nt, Artificial
  synthetic
uucgucauuagcaucauuggcgc

SEQ ID NO: 4372 - RNA, 23 nt, Artificial
  synthetic
ugucgucauuagcaucauuggcg

SEQ ID NO: 4373 - RNA, 23 nt, Artificial
  synthetic
uugugucgucauuagcaucauug

SEQ ID NO: 4374 - RNA, 23 nt, Artificial
  synthetic
ucugugucgucauuagcaucauu

SEQ ID NO: 4375 - RNA, 23 nt, Artificial
  synthetic
ugcuguagugcacuuugagcgag

SEQ ID NO: 4376 - RNA, 23 nt, Artificial
  synthetic
uugucgagacuggaaugggcugu

SEQ ID NO: 4377 - RNA, 23 nt, Artificial
  synthetic
uguugucgagacuggaaugggcu

SEQ ID NO: 4378 - RNA, 23 nt, Artificial
  synthetic
uuacaacugcuguuggugguggg

SEQ ID NO: 4379 - RNA, 23 nt, Artificial
  synthetic
uuuacaacugcuguugguggugg

SEQ ID NO: 4380 - RNA, 23 nt, Artificial
  synthetic
ucuuacaacugcuguugguggug

SEQ ID NO: 4381 - RNA, 23 nt, Artificial
  synthetic
ugccuuacaacugcuguuggugg

SEQ ID NO: 4382 - RNA, 23 nt, Artificial
  synthetic
ucagccuuacaacugcuguuggu

SEQ ID NO: 4383 - RNA, 23 nt, Artificial
  synthetic
uguugguagaagcaguagaaggg

SEQ ID NO: 4384 - RNA, 23 nt, Artificial
  synthetic
ucaguugguagaagcaguagaag

SEQ ID NO: 4385 - RNA, 23 nt, Artificial
  synthetic
uccaguugguagaagcaguagaa

SEQ ID NO: 4386 - RNA, 23 nt, Artificial
  synthetic
ucuuccaguugguagaagcagua

SEQ ID NO: 4387 - RNA, 23 nt, Artificial
  synthetic
uguuuucugugcuuccaguuggu

SEQ ID NO: 4388 - RNA, 23 nt, Artificial
  synthetic
uuggauguuacaagaaaucaaca

SEQ ID NO: 4389 - RNA, 23 nt, Artificial
  synthetic
uuauuggauguuacaagaaauca

SEQ ID NO: 4390 - RNA, 23 nt, Artificial
  synthetic
uccuauuggauguuacaagaaau

SEQ ID NO: 4391 - RNA, 23 nt, Artificial
  synthetic
uuccuauuggauguuacaagaaa

SEQ ID NO: 4392 - RNA, 23 nt, Artificial
  synthetic
ucauuccuauuggauguuacaag

SEQ ID NO: 4393 - RNA, 23 nt, Artificial
  synthetic
uagcauuccuauuggauguuaca

SEQ ID NO: 4394 - RNA, 23 nt, Artificial
  synthetic
uuagcauuccuauuggauguuac

SEQ ID NO: 4395 - RNA, 23 nt, Artificial
  synthetic
uuuagcauuccuauuggauguua

SEQ ID NO: 4396 - RNA, 23 nt, Artificial
  synthetic
uguuagcauuccuauuggauguu

SEQ ID NO: 4397 - RNA, 23 nt, Artificial
  synthetic
ugaacuguuagcauuccuauugg

SEQ ID NO: 4398 - RNA, 23 nt, Artificial
  synthetic
uugaacuguuagcauuccuauug

SEQ ID NO: 4399 - RNA, 23 nt, Artificial
  synthetic
ugugaacuguuagcauuccuauu

SEQ ID NO: 4400 - RNA, 23 nt, Artificial
  synthetic
uagugaacuguuagcauuccuau

SEQ ID NO: 4401 - RNA, 23 nt, Artificial
  synthetic
uaagugaacuguuagcauuccua

SEQ ID NO: 4402 - RNA, 23 nt, Artificial
  synthetic
ucaagugaacuguuagcauuccu

SEQ ID NO: 4403 - RNA, 23 nt, Artificial
  synthetic
uacugcaagugaacuguuagcau

SEQ ID NO: 4404 - RNA, 23 nt, Artificial
  synthetic
ucuuccacugcaagugaacuguu

SEQ ID NO: 4405 - RNA, 23 nt, Artificial
  synthetic
ucuaaaugccucuacucggucca

SEQ ID NO: 4406 - RNA, 23 nt, Artificial
  synthetic
uccuaaaugccucuacucggucc

SEQ ID NO: 4407 - RNA, 23 nt, Artificial
  synthetic
uuauggaauuauggaauagcccc

SEQ ID NO: 4408 - RNA, 23 nt, Artificial
  synthetic
uaauaacuuccaguuucggcaag

SEQ ID NO: 4409 - RNA, 23 nt, Artificial
  synthetic
uuaaauaacuuccaguuucggca

SEQ ID NO: 4410 - RNA, 23 nt, Artificial
  synthetic
uauaaauaacuuccaguuucggc

SEQ ID NO: 4411 - RNA, 23 nt, Artificial
  synthetic
uaauaaauaacuuccaguuucgg

SEQ ID NO: 4412 - RNA, 23 nt, Artificial
  synthetic
uaaauaaauaacuuccaguuucg

SEQ ID NO: 4413 - RNA, 23 nt, Artificial
  synthetic
uaugacuuucaaggguuauuaaa

SEQ ID NO: 4414 - RNA, 23 nt, Artificial
  synthetic
ucaugacuuucaaggguuauuaa

SEQ ID NO: 4415 - RNA, 23 nt, Artificial
  synthetic
uguucaugacuuucaaggguuau

SEQ ID NO: 4416 - RNA, 23 nt, Artificial
  synthetic
uauguguucaugacuuucaaggg

SEQ ID NO: 4417 - RNA, 23 nt, Artificial
  synthetic
uuagcugauguguucaugacuuu

SEQ ID NO: 4418 - RNA, 23 nt, Artificial
  synthetic
ucuagcugauguguucaugacuu

SEQ ID NO: 4419 - RNA, 23 nt, Artificial
  synthetic
ugcuagcugauguguucaugacu

SEQ ID NO: 4420 - RNA, 23 nt, Artificial
  synthetic
uugcuagcugauguguucaugac

SEQ ID NO: 4421 - RNA, 23 nt, Artificial
  synthetic
uugcuagcugauguguucaugac

SEQ ID NO: 4422 - RNA, 23 nt, Artificial
  synthetic
uuugcuagcugauguguucauga

SEQ ID NO: 4423 - RNA, 23 nt, Artificial
  synthetic
uuuugcuagcugauguguucaug

SEQ ID NO: 4424 - RNA, 23 nt, Artificial
  synthetic
uuuuugcuagcugauguguucau

SEQ ID NO: 4425 - RNA, 23 nt, Artificial
  synthetic
ucuuuugcuagcugauguguuca

SEQ ID NO: 4426 - RNA, 23 nt, Artificial
  synthetic
uacuucuuuugcuagcugaugug

SEQ ID NO: 4427 - RNA, 23 nt, Artificial
  synthetic
ucuuguuacuucuuuugcuagcu

SEQ ID NO: 4428 - RNA, 23 nt, Artificial
  synthetic
ugcaagaaucacucuuguuacuu

SEQ ID NO: 4429 - RNA, 23 nt, Artificial
  synthetic
uagcaagaaucacucuuguuacu

SEQ ID NO: 4430 - RNA, 23 nt, Artificial
  synthetic
ucagcaagaaucacucuuguuac

SEQ ID NO: 4431 - RNA, 23 nt, Artificial
  synthetic
uauagcagcaagaaucacucuug

SEQ ID NO: 4432 - RNA, 23 nt, Artificial
  synthetic
uaauagcagcaagaaucacucuu

SEQ ID NO: 4433 - RNA, 23 nt, Artificial
  synthetic
uguaauagcagcaagaaucacuc

SEQ ID NO: 4434 - RNA, 23 nt, Artificial
  synthetic
uuuaguaaaagggcguuccaagu

SEQ ID NO: 4435 - RNA, 23 nt, Artificial
  synthetic
uuuuaguaaaagggcguuccaag

SEQ ID NO: 4436 - RNA, 23 nt, Artificial
  synthetic
uaguuuaguaaaagggcguucca

SEQ ID NO: 4437 - RNA, 23 nt, Artificial
  synthetic
uaaguuuaguaaaagggcguucc

SEQ ID NO: 4438 - RNA, 23 nt, Artificial
  synthetic
ucaaguuuaguaaaagggcguuc

SEQ ID NO: 4439 - RNA, 23 nt, Artificial
  synthetic
uucaaguuuaguaaaagggcguu

SEQ ID NO: 4440 - RNA, 23 nt, Artificial
  synthetic
ucgguaagaauuuacugaaacuu

SEQ ID NO: 4441 - RNA, 23 nt, Artificial
  synthetic
uacgguaagaauuuacugaaacu

SEQ ID NO: 4442 - RNA, 23 nt, Artificial
  synthetic
ugacgguaagaauuuacugaaac

SEQ ID NO: 4443 - RNA, 23 nt, Artificial
  synthetic
uugacgguaagaauuuacugaaa

SEQ ID NO: 4444 - RNA, 23 nt, Artificial
  synthetic
uuugacgguaagaauuuacugaa

SEQ ID NO: 4445 - RNA, 23 nt, Artificial
  synthetic
uuuugacgguaagaauuuacuga

SEQ ID NO: 4446 - RNA, 23 nt, Artificial
  synthetic
uguuugacgguaagaauuuacug

SEQ ID NO: 4447 - RNA, 23 nt, Artificial
  synthetic
uaguuugacgguaagaauuuacu

SEQ ID NO: 4448 - RNA, 23 nt, Artificial
  synthetic
ucaguuugacgguaagaauuuac

SEQ ID NO: 4449 - RNA, 23 nt, Artificial
  synthetic
uucaguuugacgguaagaauuua

SEQ ID NO: 4450 - RNA, 23 nt, Artificial
  synthetic
ugucaguuugacgguaagaauuu

SEQ ID NO: 4451 - RNA, 23 nt, Artificial
  synthetic
ucgucaguuugacgguaagaauu

SEQ ID NO: 4452 - RNA, 23 nt, Artificial
  synthetic
uccgucaguuugacgguaagaau

SEQ ID NO: 4453 - RNA, 23 nt, Artificial
  synthetic
uuccgucaguuugacgguaagaa

SEQ ID NO: 4454 - RNA, 23 nt, Artificial
  synthetic
uauccgucaguuugacgguaaga

SEQ ID NO: 4455 - RNA, 23 nt, Artificial
  synthetic
uaauccgucaguuugacgguaag

SEQ ID NO: 4456 - RNA, 23 nt, Artificial
  synthetic
uaauccgucaguuugacgguaag

SEQ ID NO: 4457 - RNA, 23 nt, Artificial
  synthetic
uuaauccgucaguuugacgguaa

SEQ ID NO: 4458 - RNA, 23 nt, Artificial
  synthetic
uuaaauaauaauccgucaguuug

SEQ ID NO: 4459 - RNA, 23 nt, Artificial
  synthetic
uagugaucaccucaucaaacuug

SEQ ID NO: 4460 - RNA, 23 nt, Artificial
  synthetic
uguugaaccacuguagacaguga

SEQ ID NO: 4461 - RNA, 23 nt, Artificial
  synthetic
uaguugaaccacuguagacagug

SEQ ID NO: 4462 - RNA, 23 nt, Artificial
  synthetic
uuaaaaguugaaccacuguagac

SEQ ID NO: 4463 - RNA, 23 nt, Artificial
  synthetic
uuuaaaaguugaaccacuguaga

SEQ ID NO: 4464 - RNA, 23 nt, Artificial
  synthetic
uucccuuaacuuaaaaguugaac

SEQ ID NO: 4465 - RNA, 23 nt, Artificial
  synthetic
uuuucccuuaacuuaaaaguuga

SEQ ID NO: 4466 - RNA, 23 nt, Artificial
  synthetic
uucuacaaaguaaaaguuuuucc

SEQ ID NO: 4467 - RNA, 23 nt, Artificial
  synthetic
uaaaagaaaucguagacugaggc

SEQ ID NO: 4468 - RNA, 23 nt, Artificial
  synthetic
ucaaaagaaaucguagacugagg

SEQ ID NO: 4469 - RNA, 23 nt, Artificial
  synthetic
uucaaaagaaaucguagacugag

SEQ ID NO: 4470 - RNA, 23 nt, Artificial
  synthetic
ugauucuguacuuuucucaugug

SEQ ID NO: 4471 - RNA, 23 nt, Artificial
  synthetic
ugauucuguacuuuucucaugug

SEQ ID NO: 4472 - RNA, 23 nt, Artificial
  synthetic
uacaacaaagucugaacauuuga

SEQ ID NO: 4473 - RNA, 23 nt, Artificial
  synthetic
uucacuuuagcacugauagcaga

SEQ ID NO: 4474 - RNA, 23 nt, Artificial
  synthetic
uagauaaacugcuaucauacgua

SEQ ID NO: 4475 - RNA, 23 nt, Artificial
  synthetic
uaagauaaacugcuaucauacgu

SEQ ID NO: 4476 - RNA, 23 nt, Artificial
  synthetic
uaaaaauucuucugaguuaucuc

SEQ ID NO: 4477 - RNA, 23 nt, Artificial
  synthetic
ucugaagugugagaaguggaucu

SEQ ID NO: 4478 - RNA, 23 nt, Artificial
  synthetic
uuugaaaucugaagugugagaag

SEQ ID NO: 4479 - RNA, 23 nt, Artificial
  synthetic
uugcguuuaggcauaguagagac

SEQ ID NO: 4480 - RNA, 23 nt, Artificial
  synthetic
uaugcguuuaggcauaguagaga

SEQ ID NO: 4481 - RNA, 23 nt, Artificial
  synthetic
ucagaaacucugugauuucgagg

SEQ ID NO: 4482 - RNA, 23 nt, Artificial
  synthetic
ugcagaaacucugugauuucgag

SEQ ID NO: 4483 - RNA, 23 nt, Artificial
  synthetic
ucauagauucagaaguagaacuu

SEQ ID NO: 4484 - RNA, 23 nt, Artificial
  synthetic
uccauagauucagaaguagaacu

SEQ ID NO: 4485 - RNA, 23 nt, Artificial
  synthetic
uuccauagauucagaaguagaac

SEQ ID NO: 4486 - RNA, 23 nt, Artificial
  synthetic
uauccauagauucagaaguagaa

SEQ ID NO: 4487 - RNA, 23 nt, Artificial
  synthetic
uguaguugauccauagauucaga

SEQ ID NO: 4488 - RNA, 23 nt, Artificial
  synthetic
uguaguugauccauagauucaga

SEQ ID NO: 4489 - RNA, 23 nt, Artificial
  synthetic
ucucuauuuuuguuuaguaguug

SEQ ID NO: 4490 - RNA, 23 nt, Artificial
  synthetic
uaagaauccuuagcacuugguuc

SEQ ID NO: 4491 - RNA, 23 nt, Artificial
  synthetic
uauucaauguugauuuccuaacu

SEQ ID NO: 4492 - RNA, 23 nt, Artificial
  synthetic
uaguauaaacuggaguuggcugu

SEQ ID NO: 4493 - RNA, 23 nt, Artificial
  synthetic
ucguacugaguugcugaagaaga

SEQ ID NO: 4494 - RNA, 23 nt, Artificial
  synthetic
uuggaaauggcaaaguagaaaga

SEQ ID NO: 4495 - RNA, 23 nt, Artificial
  synthetic
uguggaaauggcaaaguagaaag

SEQ ID NO: 4496 - RNA, 23 nt, Artificial
  synthetic
uuccuauuggauguuacaagaaa

SEQ ID NO: 4497 - RNA, 23 nt, Artificial
  synthetic
uuaaauaacuuccaguuucggca

SEQ ID NO: 4498 - RNA, 23 nt, Artificial
  synthetic
uuaaauaacuuccaguuucggca

SEQ ID NO: 4499 - RNA, 23 nt, Artificial
  synthetic
uuaaauaacuuccaguuucggca

SEQ ID NO: 4500 - RNA, 23 nt, Artificial
  synthetic
uaaauaaauaacuuccaguuucg

SEQ ID NO: 4501 - RNA, 23 nt, Artificial
  synthetic
uauguguucaugacuuucaaggg

SEQ ID NO: 4502 - RNA, 23 nt, Artificial
  synthetic
uauguguucaugacuuucaaggg

SEQ ID NO: 4503 - RNA, 23 nt, Artificial
  synthetic
uuagcugauguguucaugacuuu

SEQ ID NO: 4504 - RNA, 23 nt, Artificial
  synthetic
uuagcugauguguucaugacuuu

SEQ ID NO: 4505 - RNA, 23 nt, Artificial
  synthetic
uuagcugauguguucaugacuuu

SEQ ID NO: 4506 - RNA, 23 nt, Artificial
  synthetic
ucuagcugauguguucaugacuu

SEQ ID NO: 4507 - RNA, 23 nt, Artificial
  synthetic
ucuagcugauguguucaugacuu

SEQ ID NO: 4508 - RNA, 23 nt, Artificial
  synthetic
uugcuagcugauguguucaugac

SEQ ID NO: 4509 - RNA, 23 nt, Artificial
  synthetic
uauagcagcaagaaucacucuug

SEQ ID NO: 4510 - RNA, 23 nt, Artificial
  synthetic
uauagcagcaagaaucacucuug

SEQ ID NO: 4511 - RNA, 23 nt, Artificial
  synthetic
uguaauagcagcaagaaucacuc

SEQ ID NO: 4512 - RNA, 23 nt, Artificial
  synthetic
uguaauagcagcaagaaucacuc

SEQ ID NO: 4513 - RNA, 23 nt, Artificial
  synthetic
uucaaguuuaguaaaagggcguu

SEQ ID NO: 4514 - RNA, 23 nt, Artificial
  synthetic
uucaaguuuaguaaaagggcguu

SEQ ID NO: 4515 - RNA, 23 nt, Artificial
  synthetic
uaauccgucaguuugacgguaag

SEQ ID NO: 4516 - RNA, 23 nt, Artificial
  synthetic
uguugaaccacuguagacaguga

SEQ ID NO: 4517 - RNA, 23 nt, Artificial
  synthetic
uguugaaccacuguagacaguga

SEQ ID NO: 4518 - RNA, 23 nt, Artificial
  synthetic
uaacuuaaaaguugaaccacugu

SEQ ID NO: 4519 - RNA, 23 nt, Artificial
  synthetic
uuaacuuaaaaguugaaccacug

SEQ ID NO: 4520 - RNA, 23 nt, Artificial
  synthetic
uaaguaaaaguuuuucccuuaac

SEQ ID NO: 4521 - RNA, 23 nt, Artificial
  synthetic
uaaagaaaucguaggcugaggca

SEQ ID NO: 4522 - RNA, 23 nt, Artificial
  synthetic
uaaaagaaaucguaggcugaggc

SEQ ID NO: 4523 - RNA, 23 nt, Artificial
  synthetic
ucaaaagaaaucguaggcugagg

SEQ ID NO: 4524 - RNA, 23 nt, Artificial
  synthetic
uuaaguauaugaaccauccucac

SEQ ID NO: 4525 - RNA, 23 nt, Artificial
  synthetic
uuaaguauaugaaccauccucac

SEQ ID NO: 4526 - RNA, 23 nt, Artificial
  synthetic
uguaaguauaugaaccauccuca

SEQ ID NO: 4527 - RNA, 23 nt, Artificial
  synthetic
uuuucacuuguacuucacauuuc

SEQ ID NO: 4528 - RNA, 23 nt, Artificial
  synthetic
uuuucacuuguacuucacauuuc

SEQ ID NO: 4529 - RNA, 23 nt, Artificial
  synthetic
uguuuuucacuuguacuucacau

SEQ ID NO: 4530 - RNA, 23 nt, Artificial
  synthetic
uguauguuuuaaaaacuccuuca

SEQ ID NO: 4531 - RNA, 23 nt, Artificial
  synthetic
uuguauguuuuaaaaacuccuuc

SEQ ID NO: 4532 - RNA, 23 nt, Artificial
  synthetic
uacacuuaggacuguauguuuua

SEQ ID NO: 4533 - RNA, 23 nt, Artificial
  synthetic
ucacacuuaggacuguauguuuu

SEQ ID NO: 4534 - RNA, 23 nt, Artificial
  synthetic
uucacacuuaggacuguauguuu

SEQ ID NO: 4535 - RNA, 23 nt, Artificial
  synthetic
uguacuuuucucaugugcagcau

SEQ ID NO: 4536 - RNA, 23 nt, Artificial
  synthetic
uuguacuuuucucaugugcagca

SEQ ID NO: 4537 - RNA, 23 nt, Artificial
  synthetic
uuugaacaaaacacucuccauua

SEQ ID NO: 4538 - RNA, 23 nt, Artificial
  synthetic
uauuugaacaaaacacucuccau

SEQ ID NO: 4539 - RNA, 23 nt, Artificial
  synthetic
uagucugagcauuugaacaaaac

SEQ ID NO: 4540 - RNA, 23 nt, Artificial
  synthetic
ugaagucugagcauuugaacaaa

SEQ ID NO: 4541 - RNA, 23 nt, Artificial
  synthetic
ucgaagucugagcauuugaacaa

SEQ ID NO: 4542 - RNA, 23 nt, Artificial
  synthetic
uacgaagucugagcauuugaaca

SEQ ID NO: 4543 - RNA, 23 nt, Artificial
  synthetic
uaacgaagucugagcauuugaac

SEQ ID NO: 4544 - RNA, 23 nt, Artificial
  synthetic
ucaacgaagucugagcauuugaa

SEQ ID NO: 4545 - RNA, 23 nt, Artificial
  synthetic
uacaacgaagucugagcauuuga

SEQ ID NO: 4546 - RNA, 23 nt, Artificial
  synthetic
ucacaacgaagucugagcauuug

SEQ ID NO: 4547 - RNA, 23 nt, Artificial
  synthetic
uuucauuauaucgaaacauguca

SEQ ID NO: 4548 - RNA, 23 nt, Artificial
  synthetic
ugaaccguauaugaagauaaacu

SEQ ID NO: 4549 - RNA, 23 nt, Artificial
  synthetic
uaauucuucugaguugucccuuu

SEQ ID NO: 4550 - RNA, 23 nt, Artificial
  synthetic
uaaauucuucugaguugucccuu

SEQ ID NO: 4551 - RNA, 23 nt, Artificial
  synthetic
ugaaauucuucugaguugucccu

SEQ ID NO: 4552 - RNA, 23 nt, Artificial
  synthetic
uagaaauucuucugaguuguccc

SEQ ID NO: 4553 - RNA, 23 nt, Artificial
  synthetic
uaaucugaagugugagaagcagc

SEQ ID NO: 4554 - RNA, 23 nt, Artificial
  synthetic
uaaaucugaagugugagaagcag

SEQ ID NO: 4555 - RNA, 23 nt, Artificial
  synthetic
ugaaaucugaagugugagaagca

SEQ ID NO: 4556 - RNA, 23 nt, Artificial
  synthetic
ugaaaucugaagugugagaagca

SEQ ID NO: 4557 - RNA, 23 nt, Artificial
  synthetic
uugaaaucugaagugugagaagc

SEQ ID NO: 4558 - RNA, 23 nt, Artificial
  synthetic
uugaaaucugaagugugagaagc

SEQ ID NO: 4559 - RNA, 23 nt, Artificial
  synthetic
uuuaacuacucuuuggucugagc

SEQ ID NO: 4560 - RNA, 23 nt, Artificial
  synthetic
uuuaacuacucuuuggucugagc

SEQ ID NO: 4561 - RNA, 23 nt, Artificial
  synthetic
uauuaacuacucuuuggucugag

SEQ ID NO: 4562 - RNA, 23 nt, Artificial
  synthetic
uauuaacuacucuuuggucugag

SEQ ID NO: 4563 - RNA, 23 nt, Artificial
  synthetic
uauugugggauacaaauucuagg

SEQ ID NO: 4564 - RNA, 23 nt, Artificial
  synthetic
ugauugugggauacaaauucuag

SEQ ID NO: 4565 - RNA, 23 nt, Artificial
  synthetic
uggauugugggauacaaauucua

SEQ ID NO: 4566 - RNA, 23 nt, Artificial
  synthetic
uaaagcuaggugauguuucacuu

SEQ ID NO: 4567 - RNA, 23 nt, Artificial
  synthetic
uaaaagcuaggugauguuucacu

SEQ ID NO: 4568 - RNA, 23 nt, Artificial
  synthetic
ugaaaagcuaggugauguuucac

SEQ ID NO: 4569 - RNA, 23 nt, Artificial
  synthetic
uugaaaagcuaggugauguuuca

SEQ ID NO: 4570 - RNA, 23 nt, Artificial
  synthetic
uuugaaaagcuaggugauguuuc

SEQ ID NO: 4571 - RNA, 23 nt, Artificial
  synthetic
uuuugaaaagcuaggugauguuu

SEQ ID NO: 4572 - RNA, 23 nt, Artificial
  synthetic
uuuuugaaaagcuaggugauguu

SEQ ID NO: 4573 - RNA, 23 nt, Artificial
  synthetic
ucuuuugaaaagcuaggugaugu

SEQ ID NO: 4574 - RNA, 23 nt, Artificial
  synthetic
ugcuuuugaaaagcuaggugaug

SEQ ID NO: 4575 - RNA, 23 nt, Artificial
  synthetic
uagcuuuugaaaagcuaggugau

SEQ ID NO: 4576 - RNA, 23 nt, Artificial
  synthetic
ucagcuuuugaaaagcuagguga

SEQ ID NO: 4577 - RNA, 23 nt, Artificial
  synthetic
uucagcuuuugaaaagcuaggug

SEQ ID NO: 4578 - RNA, 23 nt, Artificial
  synthetic
uuugauccauagauucagaugua

SEQ ID NO: 4579 - RNA, 23 nt, Artificial
  synthetic
uguugauccauagauucagaugu

SEQ ID NO: 4580 - RNA, 23 nt, Artificial
  synthetic
uaguugauccauagauucagaug

SEQ ID NO: 4581 - RNA, 23 nt, Artificial
  synthetic
uaguugauccauagauucagaug

SEQ ID NO: 4582 - RNA, 23 nt, Artificial
  synthetic
uuaguugauccauagauucagau

SEQ ID NO: 4583 - RNA, 23 nt, Artificial
  synthetic
uuaguugauccauagauucagau

SEQ ID NO: 4584 - RNA, 23 nt, Artificial
  synthetic
uuuaguaguugauccauagauuc

SEQ ID NO: 4585 - RNA, 23 nt, Artificial
  synthetic
ucuuaguaguugauccauagauu

SEQ ID NO: 4586 - RNA, 23 nt, Artificial
  synthetic
ugcuuaguaguugauccauagau

SEQ ID NO: 4587 - RNA, 23 nt, Artificial
  synthetic
uugcuuaguaguugauccauaga

SEQ ID NO: 4588 - RNA, 23 nt, Artificial
  synthetic
uuugcuuaguaguugauccauag

SEQ ID NO: 4589 - RNA, 23 nt, Artificial
  synthetic
uuuugcuuaguaguugauccaua

SEQ ID NO: 4590 - RNA, 23 nt, Artificial
  synthetic
uuuuugcuuaguaguugauccau

SEQ ID NO: 4591 - RNA, 23 nt, Artificial
  synthetic
uuuuuugcuuaguaguugaucca

SEQ ID NO: 4592 - RNA, 23 nt, Artificial
  synthetic
uaucucgugacuuuucuccuucu

SEQ ID NO: 4593 - RNA, 23 nt, Artificial
  synthetic
uaagaacgaggguugaacuccuu

SEQ ID NO: 4594 - RNA, 23 nt, Artificial
  synthetic
uagaaagaacgaggguugaacuc

SEQ ID NO: 4595 - RNA, 23 nt, Artificial
  synthetic
ugagaaagaacgaggguugaacu

SEQ ID NO: 4596 - RNA, 23 nt, Artificial
  synthetic
uagagaaagaacgaggguugaac

SEQ ID NO: 4597 - RNA, 23 nt, Artificial
  synthetic
ugagagaaagaacgaggguugaa

SEQ ID NO: 4598 - RNA, 23 nt, Artificial
  synthetic
uugagagaaagaacgaggguuga

SEQ ID NO: 4599 - RNA, 23 nt, Artificial
  synthetic
uuuuggcugagagaaagaacgag

SEQ ID NO: 4600 - RNA, 23 nt, Artificial
  synthetic
ucuuuggcugagagaaagaacga

SEQ ID NO: 4601 - RNA, 23 nt, Artificial
  synthetic
uuuaccuuguaugacaggacugu

SEQ ID NO: 4602 - RNA, 23 nt, Artificial
  synthetic
uauuaccuuguaugacaggacug

SEQ ID NO: 4603 - RNA, 23 nt, Artificial
  synthetic
uuggcauuaccuuguaugacagg

SEQ ID NO: 4604 - RNA, 23 nt, Artificial
  synthetic
ucuggcauuaccuuguaugacag

SEQ ID NO: 4605 - RNA, 23 nt, Artificial
  synthetic
ugguggaaauggcaaaguagaaa

SEQ ID NO: 4606 - RNA, 23 nt, Artificial
  synthetic
uaguucuaguuuucugugcuucc

SEQ ID NO: 4607 - RNA, 23 nt, Artificial
  synthetic
ugaaguucuaguuuucugugcuu

SEQ ID NO: 4608 - RNA, 23 nt, Artificial
  synthetic
uaugaaguucuaguuuucugugc

SEQ ID NO: 4609 - RNA, 23 nt, Artificial
  synthetic
uaaugaaguucuaguuuucugug

SEQ ID NO: 4610 - RNA, 23 nt, Artificial
  synthetic
uacuuccaguuucagcaagcaga

SEQ ID NO: 4611 - RNA, 23 nt, Artificial
  synthetic
uuaaauaacuuccaguuucagca

SEQ ID NO: 4612 - RNA, 23 nt, Artificial
  synthetic
uauaaauaacuuccaguuucagc

SEQ ID NO: 4613 - RNA, 23 nt, Artificial
  synthetic
uaauaaauaacuuccaguuucag

SEQ ID NO: 4614 - RNA, 23 nt, Artificial
  synthetic
uaauaaauaacuuccaguuucag

SEQ ID NO: 4615 - RNA, 23 nt, Artificial
  synthetic
ugauguguucaugacucucaagg

SEQ ID NO: 4616 - RNA, 23 nt, Artificial
  synthetic
uuagcugauguguucaugacucu

SEQ ID NO: 4617 - RNA, 23 nt, Artificial
  synthetic
uuagcugauguguucaugacucu

SEQ ID NO: 4618 - RNA, 23 nt, Artificial
  synthetic
ucuagcugauguguucaugacuc

SEQ ID NO: 4619 - RNA, 23 nt, Artificial
  synthetic
ucuagcugauguguucaugacuc

SEQ ID NO: 4620 - RNA, 23 nt, Artificial
  synthetic
uuugcuagcugauguguucauga

SEQ ID NO: 4621 - RNA, 23 nt, Artificial
  synthetic
uguugcuagcugauguguucaug

SEQ ID NO: 4622 - RNA, 23 nt, Artificial
  synthetic
uuacuucuguugcuagcugaugu

SEQ ID NO: 4623 - RNA, 23 nt, Artificial
  synthetic
uguuacuucuguugcuagcugau

SEQ ID NO: 4624 - RNA, 23 nt, Artificial
  synthetic
ucuuguuacuucuguugcuagcu

SEQ ID NO: 4625 - RNA, 23 nt, Artificial
  synthetic
uucuuguuacuucuguugcuagc

SEQ ID NO: 4626 - RNA, 23 nt, Artificial
  synthetic
ugaaucacucuuguuacuucugu

SEQ ID NO: 4627 - RNA, 23 nt, Artificial
  synthetic
ugaaucacucuuguuacuucugu

SEQ ID NO: 4628 - RNA, 23 nt, Artificial
  synthetic
uaaagcgguaauagcagcaagaa

SEQ ID NO: 4629 - RNA, 23 nt, Artificial
  synthetic
uuuuaaagcgguaauagcagcaa

SEQ ID NO: 4630 - RNA, 23 nt, Artificial
  synthetic
uugucaaguuuaguaaaagggcg

SEQ ID NO: 4631 - RNA, 23 nt, Artificial
  synthetic
uucugucaaguuuaguaaaaggg

SEQ ID NO: 4632 - RNA, 23 nt, Artificial
  synthetic
uuucugucaaguuuaguaaaagg

SEQ ID NO: 4633 - RNA, 23 nt, Artificial
  synthetic
uaacuucugucaaguuuaguaaa

SEQ ID NO: 4634 - RNA, 23 nt, Artificial
  synthetic
uugaacuucugucaaguuuagua

SEQ ID NO: 4635 - RNA, 23 nt, Artificial
  synthetic
uuuacugaacuucugucaaguuu

SEQ ID NO: 4636 - RNA, 23 nt, Artificial
  synthetic
uaauuuacugaacuucugucaag

SEQ ID NO: 4637 - RNA, 23 nt, Artificial
  synthetic
uagaauuuacugaacuucuguca

SEQ ID NO: 4638 - RNA, 23 nt, Artificial
  synthetic
uaagaauuuacugaacuucuguc

SEQ ID NO: 4639 - RNA, 23 nt, Artificial
  synthetic
uuaagaauuuacugaacuucugu

SEQ ID NO: 4640 - RNA, 23 nt, Artificial
  synthetic
uauaauaauccgucaguuuggcg

SEQ ID NO: 4641 - RNA, 23 nt, Artificial
  synthetic
uaguaaaaguuuucccuuaacuu

SEQ ID NO: 4642 - RNA, 23 nt, Artificial
  synthetic
uaaguaaaaguuuucccuuaacu

SEQ ID NO: 4643 - RNA, 23 nt, Artificial
  synthetic
uaaaguaaaaguuuucccuuaac

SEQ ID NO: 4644 - RNA, 23 nt, Artificial
  synthetic
uacaaaguaaaaguuuucccuua

SEQ ID NO: 4645 - RNA, 23 nt, Artificial
  synthetic
uuacaaaguaaaaguuuucccuu

SEQ ID NO: 4646 - RNA, 23 nt, Artificial
  synthetic
uucuacaaaguaaaaguuuuccc

SEQ ID NO: 4647 - RNA, 23 nt, Artificial
  synthetic
uaucuacaaaguaaaaguuuucc

SEQ ID NO: 4648 - RNA, 23 nt, Artificial
  synthetic
uaucuacaaaguaaaaguuuucc

SEQ ID NO: 4649 - DNA, 23 bp, Artificial
  synthetic
cctccgacttccggtaaagagtc

SEQ ID NO: 4650 - DNA, 23 bp, Artificial
  synthetic
ctccgacttccggtaaagagtcc

SEQ ID NO: 4651 - DNA, 23 bp, Artificial
  synthetic
tccgacttccggtaaagagtccc

SEQ ID NO: 4652 - DNA, 23 bp, Artificial
  synthetic
caaatgtgaagtacaagtgaaaa

SEQ ID NO: 4653 - DNA, 23 bp, Artificial
  synthetic
aaatgtgaagtacaagtgaaaaa

SEQ ID NO: 4654 - DNA, 23 bp, Artificial
  synthetic
atgtgaagtacaagtgaaaaatg

SEQ ID NO: 4655 - DNA, 23 bp, Artificial
  synthetic
cacatgagaaaagtacagaatcc

SEQ ID NO: 4656 - DNA, 23 bp, Artificial
  synthetic
tccacttctcacacttcagattt

SEQ ID NO: 4657 - DNA, 23 bp, Artificial
  synthetic
ccacttctcacacttcagatttc

SEQ ID NO: 4658 - DNA, 23 bp, Artificial
  synthetic
cacttctcacacttcagatttca

SEQ ID NO: 4659 - DNA, 23 bp, Artificial
  synthetic
acttctcacacttcagatttcaa

SEQ ID NO: 4660 - DNA, 23 bp, Artificial
  synthetic
cttctcacacttcagatttcaac

SEQ ID NO: 4661 - DNA, 23 bp, Artificial
  synthetic
ttctcacacttcagatttcaacc

SEQ ID NO: 4662 - DNA, 23 bp, Artificial
  synthetic
tctcacacttcagatttcaaccc

SEQ ID NO: 4663 - DNA, 23 bp, Artificial
  synthetic
ctcacacttcagatttcaacccg

SEQ ID NO: 4664 - DNA, 23 bp, Artificial
  synthetic
acacttcagatttcaacccgaat

SEQ ID NO: 4665 - DNA, 23 bp, Artificial
  synthetic
gttcagaccaaagagtagttaat

SEQ ID NO: 4666 - DNA, 23 bp, Artificial
  synthetic
ttcagaccaaagagtagttaatg

SEQ ID NO: 4667 - DNA, 23 bp, Artificial
  synthetic
gtctctactatgcctaaacgcat

SEQ ID NO: 4668 - DNA, 23 bp, Artificial
  synthetic
tctctactatgcctaaacgcatg

SEQ ID NO: 4669 - DNA, 23 bp, Artificial
  synthetic
tctactatgcctaaacgcatgtc

SEQ ID NO: 4670 - DNA, 23 bp, Artificial
  synthetic
tacttctgaatctatggatcaac

SEQ ID NO: 4671 - DNA, 23 bp, Artificial
  synthetic
acttctgaatctatggatcaact

SEQ ID NO: 4672 - DNA, 23 bp, Artificial
  synthetic
cttctgaatctatggatcaacta

SEQ ID NO: 4673 - DNA, 23 bp, Artificial
  synthetic
ttctgaatctatggatcaactac

SEQ ID NO: 4674 - DNA, 23 bp, Artificial
  synthetic
tctgaatctatggatcaactact

SEQ ID NO: 4675 - DNA, 23 bp, Artificial
  synthetic
ctgaatctatggatcaactacta

SEQ ID NO: 4676 - DNA, 23 bp, Artificial
  synthetic
tgaatctatggatcaactactaa

SEQ ID NO: 4677 - DNA, 23 bp, Artificial
  synthetic
gaatctatggatcaactactaaa

SEQ ID NO: 4678 - DNA, 23 bp, Artificial
  synthetic
tttatacccaatacctatgacgc

SEQ ID NO: 4679 - DNA, 23 bp, Artificial
  synthetic
aagacatatagagcagtaccaaa

SEQ ID NO: 4680 - DNA, 23 bp, Artificial
  synthetic
acatatagagcagtaccaaatat

SEQ ID NO: 4681 - DNA, 23 bp, Artificial
  synthetic
catatagagcagtaccaaatatg

SEQ ID NO: 4682 - DNA, 23 bp, Artificial
  synthetic
atatagagcagtaccaaatatgc

SEQ ID NO: 4683 - DNA, 23 bp, Artificial
  synthetic
atagagcagtaccaaatatgccc

SEQ ID NO: 4684 - DNA, 23 bp, Artificial
  synthetic
catgtcccaaattaccatacaac

SEQ ID NO: 4685 - DNA, 23 bp, Artificial
  synthetic
tgtcccaaattaccatacaacaa

SEQ ID NO: 4686 - DNA, 23 bp, Artificial
  synthetic
acaagcccttctttctactttgc

SEQ ID NO: 4687 - DNA, 23 bp, Artificial
  synthetic
agcccttctttctactttgccat

SEQ ID NO: 4688 - DNA, 23 bp, Artificial
  synthetic
gcccttctttctactttgccatt

SEQ ID NO: 4689 - DNA, 23 bp, Artificial
  synthetic
cccttctttctactttgccattt

SEQ ID NO: 4690 - DNA, 23 bp, Artificial
  synthetic
ccttctttctactttgccatttc

SEQ ID NO: 4691 - DNA, 23 bp, Artificial
  synthetic
cttctttctactttgccatttcc

SEQ ID NO: 4692 - DNA, 23 bp, Artificial
  synthetic
ttctttctactttgccatttcca

SEQ ID NO: 4693 - DNA, 23 bp, Artificial
  synthetic
tctttctactttgccatttccac

SEQ ID NO: 4694 - DNA, 23 bp, Artificial
  synthetic
ctttctactttgccatttccacg

SEQ ID NO: 4695 - DNA, 23 bp, Artificial
  synthetic
ctcatgtacagtcaggaatggtt

SEQ ID NO: 4696 - DNA, 23 bp, Artificial
  synthetic
tcatgtacagtcaggaatggttc

SEQ ID NO: 4697 - DNA, 23 bp, Artificial
  synthetic
catgtacagtcaggaatggttcc

SEQ ID NO: 4698 - DNA, 23 bp, Artificial
  synthetic
gtcaggaatggttccttctcatc

SEQ ID NO: 4699 - DNA, 23 bp, Artificial
  synthetic
aggaatggttccttctcatccaa

SEQ ID NO: 4700 - DNA, 23 bp, Artificial
  synthetic
gaatggttccttctcatccaact

SEQ ID NO: 4701 - DNA, 23 bp, Artificial
  synthetic
aatggttccttctcatccaactg

SEQ ID NO: 4702 - DNA, 23 bp, Artificial
  synthetic
tggttccttctcatccaactgcc

SEQ ID NO: 4703 - DNA, 23 bp, Artificial
  synthetic
cccatgcgccaatgatgctaatg

SEQ ID NO: 4704 - DNA, 23 bp, Artificial
  synthetic
atgcgccaatgatgctaatgacg

SEQ ID NO: 4705 - DNA, 23 bp, Artificial
  synthetic
gcgccaatgatgctaatgacgac

SEQ ID NO: 4706 - DNA, 23 bp, Artificial
  synthetic
cgccaatgatgctaatgacgaca

SEQ ID NO: 4707 - DNA, 23 bp, Artificial
  synthetic
caatgatgctaatgacgacacag

SEQ ID NO: 4708 - DNA, 23 bp, Artificial
  synthetic
aatgatgctaatgacgacacagc

SEQ ID NO: 4709 - DNA, 23 bp, Artificial
  synthetic
ctcgctcaaagtgcactacagcc

SEQ ID NO: 4710 - DNA, 23 bp, Artificial
  synthetic
acagcccattccagtctcgacaa

SEQ ID NO: 4711 - DNA, 23 bp, Artificial
  synthetic
agcccattccagtctcgacaaca

SEQ ID NO: 4712 - DNA, 23 bp, Artificial
  synthetic
cccaccaccaacagcagttgtaa

SEQ ID NO: 4713 - DNA, 23 bp, Artificial
  synthetic
ccaccaccaacagcagttgtaag

SEQ ID NO: 4714 - DNA, 23 bp, Artificial
  synthetic
caccaccaacagcagttgtaagg

SEQ ID NO: 4715 - DNA, 23 bp, Artificial
  synthetic
ccaccaacagcagttgtaaggct

SEQ ID NO: 4716 - DNA, 23 bp, Artificial
  synthetic
accaacagcagttgtaaggctgc

SEQ ID NO: 4717 - DNA, 23 bp, Artificial
  synthetic
cccttctactgcttctaccaact

SEQ ID NO: 4718 - DNA, 23 bp, Artificial
  synthetic
cttctactgcttctaccaactgg

SEQ ID NO: 4719 - DNA, 23 bp, Artificial
  synthetic
ttctactgcttctaccaactgga

SEQ ID NO: 4720 - DNA, 23 bp, Artificial
  synthetic
tactgcttctaccaactggaagc

SEQ ID NO: 4721 - DNA, 23 bp, Artificial
  synthetic
accaactggaagcacagaaaact

SEQ ID NO: 4722 - DNA, 23 bp, Artificial
  synthetic
tgttgatttcttgtaacatccaa

SEQ ID NO: 4723 - DNA, 23 bp, Artificial
  synthetic
tgatttcttgtaacatccaatag

SEQ ID NO: 4724 - DNA, 23 bp, Artificial
  synthetic
atttcttgtaacatccaatagga

SEQ ID NO: 4725 - DNA, 23 bp, Artificial
  synthetic
tttcttgtaacatccaataggaa

SEQ ID NO: 4726 - DNA, 23 bp, Artificial
  synthetic
cttgtaacatccaataggaatgc

SEQ ID NO: 4727 - DNA, 23 bp, Artificial
  synthetic
tgtaacatccaataggaatgcta

SEQ ID NO: 4728 - DNA, 23 bp, Artificial
  synthetic
gtaacatccaataggaatgctaa

SEQ ID NO: 4729 - DNA, 23 bp, Artificial
  synthetic
taacatccaataggaatgctaac

SEQ ID NO: 4730 - DNA, 23 bp, Artificial
  synthetic
aacatccaataggaatgctaaca

SEQ ID NO: 4731 - DNA, 23 bp, Artificial
  synthetic
ccaataggaatgctaacagttca

SEQ ID NO: 4732 - DNA, 23 bp, Artificial
  synthetic
caataggaatgctaacagttcac

SEQ ID NO: 4733 - DNA, 23 bp, Artificial
  synthetic
aataggaatgctaacagttcact

SEQ ID NO: 4734 - DNA, 23 bp, Artificial
  synthetic
ataggaatgctaacagttcactt

SEQ ID NO: 4735 - DNA, 23 bp, Artificial
  synthetic
taggaatgctaacagttcacttg

SEQ ID NO: 4736 - DNA, 23 bp, Artificial
  synthetic
aggaatgctaacagttcacttgc

SEQ ID NO: 4737 - DNA, 23 bp, Artificial
  synthetic
atgctaacagttcacttgcagtg

SEQ ID NO: 4738 - DNA, 23 bp, Artificial
  synthetic
aacagttcacttgcagtggaaga

SEQ ID NO: 4739 - DNA, 23 bp, Artificial
  synthetic
tggaccgagtagaggcatttagg

SEQ ID NO: 4740 - DNA, 23 bp, Artificial
  synthetic
ggaccgagtagaggcatttagga

SEQ ID NO: 4741 - DNA, 23 bp, Artificial
  synthetic
ggggctattccataattccatat

SEQ ID NO: 4742 - DNA, 23 bp, Artificial
  synthetic
cttgccgaaactggaagttattt

SEQ ID NO: 4743 - DNA, 23 bp, Artificial
  synthetic
tgccgaaactggaagttatttat

SEQ ID NO: 4744 - DNA, 23 bp, Artificial
  synthetic
gccgaaactggaagttatttatt

SEQ ID NO: 4745 - DNA, 23 bp, Artificial
  synthetic
ccgaaactggaagttatttattt

SEQ ID NO: 4746 - DNA, 23 bp, Artificial
  synthetic
cgaaactggaagttatttatttt

SEQ ID NO: 4747 - DNA, 23 bp, Artificial
  synthetic
tttaataacccttgaaagtcatg

SEQ ID NO: 4748 - DNA, 23 bp, Artificial
  synthetic
ttaataacccttgaaagtcatga

SEQ ID NO: 4749 - DNA, 23 bp, Artificial
  synthetic
ataacccttgaaagtcatgaaca

SEQ ID NO: 4750 - DNA, 23 bp, Artificial
  synthetic
cccttgaaagtcatgaacacatc

SEQ ID NO: 4751 - DNA, 23 bp, Artificial
  synthetic
aaagtcatgaacacatcagctag

SEQ ID NO: 4752 - DNA, 23 bp, Artificial
  synthetic
aagtcatgaacacatcagctagc

SEQ ID NO: 4753 - DNA, 23 bp, Artificial
  synthetic
agtcatgaacacatcagctagca

SEQ ID NO: 4754 - DNA, 23 bp, Artificial
  synthetic
gtcatgaacacatcagctagcaa

SEQ ID NO: 4755 - DNA, 23 bp, Artificial
  synthetic
gtcatgaacacatcagctagcaa

SEQ ID NO: 4756 - DNA, 23 bp, Artificial
  synthetic
tcatgaacacatcagctagcaaa

SEQ ID NO: 4757 - DNA, 23 bp, Artificial
  synthetic
catgaacacatcagctagcaaaa

SEQ ID NO: 4758 - DNA, 23 bp, Artificial
  synthetic
atgaacacatcagctagcaaaag

SEQ ID NO: 4759 - DNA, 23 bp, Artificial
  synthetic
tgaacacatcagctagcaaaaga

SEQ ID NO: 4760 - DNA, 23 bp, Artificial
  synthetic
cacatcagctagcaaaagaagta

SEQ ID NO: 4761 - DNA, 23 bp, Artificial
  synthetic
agctagcaaaagaagtaacaaga

SEQ ID NO: 4762 - DNA, 23 bp, Artificial
  synthetic
aagtaacaagagtgattcttgct

SEQ ID NO: 4763 - DNA, 23 bp, Artificial
  synthetic
agtaacaagagtgattcttgctg

SEQ ID NO: 4764 - DNA, 23 bp, Artificial
  synthetic
gtaacaagagtgattcttgctgc

SEQ ID NO: 4765 - DNA, 23 bp, Artificial
  synthetic
caagagtgattcttgctgctatt

SEQ ID NO: 4766 - DNA, 23 bp, Artificial
  synthetic
aagagtgattcttgctgctatta

SEQ ID NO: 4767 - DNA, 23 bp, Artificial
  synthetic
gagtgattcttgctgctattact

SEQ ID NO: 4768 - DNA, 23 bp, Artificial
  synthetic
acttggaacgcccttttactaaa

SEQ ID NO: 4769 - DNA, 23 bp, Artificial
  synthetic
cttggaacgcccttttactaaac

SEQ ID NO: 4770 - DNA, 23 bp, Artificial
  synthetic
tggaacgcccttttactaaactt

SEQ ID NO: 4771 - DNA, 23 bp, Artificial
  synthetic
ggaacgcccttttactaaacttg

SEQ ID NO: 4772 - DNA, 23 bp, Artificial
  synthetic
gaacgcccttttactaaacttga

SEQ ID NO: 4773 - DNA, 23 bp, Artificial
  synthetic
aacgcccttttactaaacttgac

SEQ ID NO: 4774 - DNA, 23 bp, Artificial
  synthetic
aagtttcagtaaattcttaccgt

SEQ ID NO: 4775 - DNA, 23 bp, Artificial
  synthetic
agtttcagtaaattcttaccgtc

SEQ ID NO: 4776 - DNA, 23 bp, Artificial
  synthetic
gtttcagtaaattcttaccgtca

SEQ ID NO: 4777 - DNA, 23 bp, Artificial
  synthetic
tttcagtaaattcttaccgtcaa

SEQ ID NO: 4778 - DNA, 23 bp, Artificial
  synthetic
ttcagtaaattcttaccgtcaaa

SEQ ID NO: 4779 - DNA, 23 bp, Artificial
  synthetic
tcagtaaattcttaccgtcaaac

SEQ ID NO: 4780 - DNA, 23 bp, Artificial
  synthetic
cagtaaattcttaccgtcaaact

SEQ ID NO: 4781 - DNA, 23 bp, Artificial
  synthetic
agtaaattcttaccgtcaaactg

SEQ ID NO: 4782 - DNA, 23 bp, Artificial
  synthetic
gtaaattcttaccgtcaaactga

SEQ ID NO: 4783 - DNA, 23 bp, Artificial
  synthetic
taaattcttaccgtcaaactgac

SEQ ID NO: 4784 - DNA, 23 bp, Artificial
  synthetic
aaattcttaccgtcaaactgacg

SEQ ID NO: 4785 - DNA, 23 bp, Artificial
  synthetic
aattcttaccgtcaaactgacgg

SEQ ID NO: 4786 - DNA, 23 bp, Artificial
  synthetic
attcttaccgtcaaactgacgga

SEQ ID NO: 4787 - DNA, 23 bp, Artificial
  synthetic
ttcttaccgtcaaactgacggat

SEQ ID NO: 4788 - DNA, 23 bp, Artificial
  synthetic
tcttaccgtcaaactgacggatt

SEQ ID NO: 4789 - DNA, 23 bp, Artificial
  synthetic
cttaccgtcaaactgacggatta

SEQ ID NO: 4790 - DNA, 23 bp, Artificial
  synthetic
cttaccgtcaaactgacggatta

SEQ ID NO: 4791 - DNA, 23 bp, Artificial
  synthetic
ttaccgtcaaactgacggattat

SEQ ID NO: 4792 - DNA, 23 bp, Artificial
  synthetic
caaactgacggattattatttat

SEQ ID NO: 4793 - DNA, 23 bp, Artificial
  synthetic
caagtttgatgaggtgatcactg

SEQ ID NO: 4794 - DNA, 23 bp, Artificial
  synthetic
tcactgtctacagtggttcaact

SEQ ID NO: 4795 - DNA, 23 bp, Artificial
  synthetic
cactgtctacagtggttcaactt

SEQ ID NO: 4796 - DNA, 23 bp, Artificial
  synthetic
gtctacagtggttcaacttttaa

SEQ ID NO: 4797 - DNA, 23 bp, Artificial
  synthetic
tctacagtggttcaacttttaag

SEQ ID NO: 4798 - DNA, 23 bp, Artificial
  synthetic
gttcaacttttaagttaagggaa

SEQ ID NO: 4799 - DNA, 23 bp, Artificial
  synthetic
tcaacttttaagttaagggaaaa

SEQ ID NO: 4800 - DNA, 23 bp, Artificial
  synthetic
ggaaaaacttttactttgtagat

SEQ ID NO: 4801 - DNA, 23 bp, Artificial
  synthetic
gcctcagtctacgatttcttttg

SEQ ID NO: 4802 - DNA, 23 bp, Artificial
  synthetic
cctcagtctacgatttcttttga

SEQ ID NO: 4803 - DNA, 23 bp, Artificial
  synthetic
ctcagtctacgatttcttttgat

SEQ ID NO: 4804 - DNA, 23 bp, Artificial
  synthetic
cacatgagaaaagtacagaatcc

SEQ ID NO: 4805 - DNA, 23 bp, Artificial
  synthetic
cacatgagaaaagtacagaatcc

SEQ ID NO: 4806 - DNA, 23 bp, Artificial
  synthetic
tcaaatgttcagactttgttgtg

SEQ ID NO: 4807 - DNA, 23 bp, Artificial
  synthetic
tctgctatcagtgctaaagtgaa

SEQ ID NO: 4808 - DNA, 23 bp, Artificial
  synthetic
tacgtatgatagcagtttatctt

SEQ ID NO: 4809 - DNA, 23 bp, Artificial
  synthetic
acgtatgatagcagtttatcttc

SEQ ID NO: 4810 - DNA, 23 bp, Artificial
  synthetic
gagataactcagaagaattttta

SEQ ID NO: 4811 - DNA, 23 bp, Artificial
  synthetic
agatccacttctcacacttcaga

SEQ ID NO: 4812 - DNA, 23 bp, Artificial
  synthetic
cttctcacacttcagatttcaac

SEQ ID NO: 4813 - DNA, 23 bp, Artificial
  synthetic
gtctctactatgcctaaacgcat

SEQ ID NO: 4814 - DNA, 23 bp, Artificial
  synthetic
tctctactatgcctaaacgcatg

SEQ ID NO: 4815 - DNA, 23 bp, Artificial
  synthetic
cctcgaaatcacagagtttctgc

SEQ ID NO: 4816 - DNA, 23 bp, Artificial
  synthetic
ctcgaaatcacagagtttctgct

SEQ ID NO: 4817 - DNA, 23 bp, Artificial
  synthetic
aagttctacttctgaatctatgg

SEQ ID NO: 4818 - DNA, 23 bp, Artificial
  synthetic
agttctacttctgaatctatgga

SEQ ID NO: 4819 - DNA, 23 bp, Artificial
  synthetic
gttctacttctgaatctatggat

SEQ ID NO: 4820 - DNA, 23 bp, Artificial
  synthetic
ttctacttctgaatctatggatc

SEQ ID NO: 4821 - DNA, 23 bp, Artificial
  synthetic
tctgaatctatggatcaactact

SEQ ID NO: 4822 - DNA, 23 bp, Artificial
  synthetic
tctgaatctatggatcaactact

SEQ ID NO: 4823 - DNA, 23 bp, Artificial
  synthetic
caactactaaacaaaaatagaga

SEQ ID NO: 4824 - DNA, 23 bp, Artificial
  synthetic
gaaccaagtgctaaggattcttt

SEQ ID NO: 4825 - DNA, 23 bp, Artificial
  synthetic
agttaggaaatcaacattgaatc

SEQ ID NO: 4826 - DNA, 23 bp, Artificial
  synthetic
acagccaactccagtttatactc

SEQ ID NO: 4827 - DNA, 23 bp, Artificial
  synthetic
tcttcttcagcaactcagtacgg

SEQ ID NO: 4828 - DNA, 23 bp, Artificial
  synthetic
tctttctactttgccatttccac

SEQ ID NO: 4829 - DNA, 23 bp, Artificial
  synthetic
ctttctactttgccatttccacg

SEQ ID NO: 4830 - DNA, 23 bp, Artificial
  synthetic
tttcttgtaacatccaataggaa

SEQ ID NO: 4831 - DNA, 23 bp, Artificial
  synthetic
tgccgaaactggaagttatttat

SEQ ID NO: 4832 - DNA, 23 bp, Artificial
  synthetic
tgccgaaactggaagttatttat

SEQ ID NO: 4833 - DNA, 23 bp, Artificial
  synthetic
tgccgaaactggaagttatttat

SEQ ID NO: 4834 - DNA, 23 bp, Artificial
  synthetic
cgaaactggaagttatttatttt

SEQ ID NO: 4835 - DNA, 23 bp, Artificial
  synthetic
cccttgaaagtcatgaacacatc

SEQ ID NO: 4836 - DNA, 23 bp, Artificial
  synthetic
cccttgaaagtcatgaacacatc

SEQ ID NO: 4837 - DNA, 23 bp, Artificial
  synthetic
aaagtcatgaacacatcagctag

SEQ ID NO: 4838 - DNA, 23 bp, Artificial
  synthetic
aaagtcatgaacacatcagctag

SEQ ID NO: 4839 - DNA, 23 bp, Artificial
  synthetic
aaagtcatgaacacatcagctag

SEQ ID NO: 4840 - DNA, 23 bp, Artificial
  synthetic
aagtcatgaacacatcagctagc

SEQ ID NO: 4841 - DNA, 23 bp, Artificial
  synthetic
aagtcatgaacacatcagctagc

SEQ ID NO: 4842 - DNA, 23 bp, Artificial
  synthetic
gtcatgaacacatcagctagcaa

SEQ ID NO: 4843 - DNA, 23 bp, Artificial
  synthetic
caagagtgattcttgctgctatt

SEQ ID NO: 4844 - DNA, 23 bp, Artificial
  synthetic
caagagtgattcttgctgctatt

SEQ ID NO: 4845 - DNA, 23 bp, Artificial
  synthetic
gagtgattcttgctgctattact

SEQ ID NO: 4846 - DNA, 23 bp, Artificial
  synthetic
gagtgattcttgctgctattact

SEQ ID NO: 4847 - DNA, 23 bp, Artificial
  synthetic
aacgcccttttactaaacttgac

SEQ ID NO: 4848 - DNA, 23 bp, Artificial
  synthetic
aacgcccttttactaaacttgac

SEQ ID NO: 4849 - DNA, 23 bp, Artificial
  synthetic
cttaccgtcaaactgacggatta

SEQ ID NO: 4850 - DNA, 23 bp, Artificial
  synthetic
tcactgtctacagtggttcaact

SEQ ID NO: 4851 - DNA, 23 bp, Artificial
  synthetic
tcactgtctacagtggttcaact

SEQ ID NO: 4852 - DNA, 23 bp, Artificial
  synthetic
acagtggttcaacttttaagtta

SEQ ID NO: 4853 - DNA, 23 bp, Artificial
  synthetic
cagtggttcaacttttaagttaa

SEQ ID NO: 4854 - DNA, 23 bp, Artificial
  synthetic
gttaagggaaaaacttttacttt

SEQ ID NO: 4855 - DNA, 23 bp, Artificial
  synthetic
tgcctcagcctacgatttctttt

SEQ ID NO: 4856 - DNA, 23 bp, Artificial
  synthetic
gcctcagcctacgatttcttttg

SEQ ID NO: 4857 - DNA, 23 bp, Artificial
  synthetic
cctcagcctacgatttcttttga

SEQ ID NO: 4858 - DNA, 23 bp, Artificial
  synthetic
gtgaggatggttcatatacttac

SEQ ID NO: 4859 - DNA, 23 bp, Artificial
  synthetic
atgaggatggttcatatacttac

SEQ ID NO: 4860 - DNA, 23 bp, Artificial
  synthetic
tgaggatggttcatatacttacg

SEQ ID NO: 4861 - DNA, 23 bp, Artificial
  synthetic
gaaatgtgaagtacaagtgaaaa

SEQ ID NO: 4862 - DNA, 23 bp, Artificial
  synthetic
caaatgtgaagtacaagtgaaaa

SEQ ID NO: 4863 - DNA, 23 bp, Artificial
  synthetic
atgtgaagtacaagtgaaaaacg

SEQ ID NO: 4864 - DNA, 23 bp, Artificial
  synthetic
tgaaggagtttttaaaacataca

SEQ ID NO: 4865 - DNA, 23 bp, Artificial
  synthetic
gaaggagtttttaaaacatacag

SEQ ID NO: 4866 - DNA, 23 bp, Artificial
  synthetic
taaaacatacagtcctaagtgtg

SEQ ID NO: 4867 - DNA, 23 bp, Artificial
  synthetic
aaaacatacagtcctaagtgtga

SEQ ID NO: 4868 - DNA, 23 bp, Artificial
  synthetic
aaacatacagtcctaagtgtgac

SEQ ID NO: 4869 - DNA, 23 bp, Artificial
  synthetic
atgctgcacatgagaaaagtaca

SEQ ID NO: 4870 - DNA, 23 bp, Artificial
  synthetic
tgctgcacatgagaaaagtacag

SEQ ID NO: 4871 - DNA, 23 bp, Artificial
  synthetic
taatggagagtgttttgttcaaa

SEQ ID NO: 4872 - DNA, 23 bp, Artificial
  synthetic
atggagagtgttttgttcaaatg

SEQ ID NO: 4873 - DNA, 23 bp, Artificial
  synthetic
gttttgttcaaatgctcagactt

SEQ ID NO: 4874 - DNA, 23 bp, Artificial
  synthetic
tttgttcaaatgctcagacttcg

SEQ ID NO: 4875 - DNA, 23 bp, Artificial
  synthetic
ttgttcaaatgctcagacttcgt

SEQ ID NO: 4876 - DNA, 23 bp, Artificial
  synthetic
tgttcaaatgctcagacttcgtt

SEQ ID NO: 4877 - DNA, 23 bp, Artificial
  synthetic
gttcaaatgctcagacttcgttg

SEQ ID NO: 4878 - DNA, 23 bp, Artificial
  synthetic
ttcaaatgctcagacttcgttgt

SEQ ID NO: 4879 - DNA, 23 bp, Artificial
  synthetic
tcaaatgctcagacttcgttgtg

SEQ ID NO: 4880 - DNA, 23 bp, Artificial
  synthetic
caaatgctcagacttcgttgtgg

SEQ ID NO: 4881 - DNA, 23 bp, Artificial
  synthetic
tgacatgtttcgatataatgaag

SEQ ID NO: 4882 - DNA, 23 bp, Artificial
  synthetic
agtttatcttcatatacggttcc

SEQ ID NO: 4883 - DNA, 23 bp, Artificial
  synthetic
aaagggacaactcagaagaattt

SEQ ID NO: 4884 - DNA, 23 bp, Artificial
  synthetic
aagggacaactcagaagaatttc

SEQ ID NO: 4885 - DNA, 23 bp, Artificial
  synthetic
agggacaactcagaagaatttct

SEQ ID NO: 4886 - DNA, 23 bp, Artificial
  synthetic
gggacaactcagaagaatttctt

SEQ ID NO: 4887 - DNA, 23 bp, Artificial
  synthetic
gctgcttctcacacttcagattt

SEQ ID NO: 4888 - DNA, 23 bp, Artificial
  synthetic
ctgcttctcacacttcagatttc

SEQ ID NO: 4889 - DNA, 23 bp, Artificial
  synthetic
tgcttctcacacttcagatttca

SEQ ID NO: 4890 - DNA, 23 bp, Artificial
  synthetic
cacttctcacacttcagatttca

SEQ ID NO: 4891 - DNA, 23 bp, Artificial
  synthetic
gcttctcacacttcagatttcaa

SEQ ID NO: 4892 - DNA, 23 bp, Artificial
  synthetic
acttctcacacttcagatttcaa

SEQ ID NO: 4893 - DNA, 23 bp, Artificial
  synthetic
gctcagaccaaagagtagttaat

SEQ ID NO: 4894 - DNA, 23 bp, Artificial
  synthetic
gttcagaccaaagagtagttaat

SEQ ID NO: 4895 - DNA, 23 bp, Artificial
  synthetic
ctcagaccaaagagtagttaatg

SEQ ID NO: 4896 - DNA, 23 bp, Artificial
  synthetic
ttcagaccaaagagtagttaatg

SEQ ID NO: 4897 - DNA, 23 bp, Artificial
  synthetic
cctagaatttgtatcccacaatc

SEQ ID NO: 4898 - DNA, 23 bp, Artificial
  synthetic
ctagaatttgtatcccacaatcc

SEQ ID NO: 4899 - DNA, 23 bp, Artificial
  synthetic
tagaatttgtatcccacaatccc

SEQ ID NO: 4900 - DNA, 23 bp, Artificial
  synthetic
aagtgaaacatcacctagctttt

SEQ ID NO: 4901 - DNA, 23 bp, Artificial
  synthetic
agtgaaacatcacctagcttttc

SEQ ID NO: 4902 - DNA, 23 bp, Artificial
  synthetic
gtgaaacatcacctagcttttca

SEQ ID NO: 4903 - DNA, 23 bp, Artificial
  synthetic
tgaaacatcacctagcttttcaa

SEQ ID NO: 4904 - DNA, 23 bp, Artificial
  synthetic
gaaacatcacctagcttttcaaa

SEQ ID NO: 4905 - DNA, 23 bp, Artificial
  synthetic
aaacatcacctagcttttcaaaa

SEQ ID NO: 4906 - DNA, 23 bp, Artificial
  synthetic
aacatcacctagcttttcaaaag

SEQ ID NO: 4907 - DNA, 23 bp, Artificial
  synthetic
acatcacctagcttttcaaaagc

SEQ ID NO: 4908 - DNA, 23 bp, Artificial
  synthetic
catcacctagcttttcaaaagct

SEQ ID NO: 4909 - DNA, 23 bp, Artificial
  synthetic
atcacctagcttttcaaaagctg

SEQ ID NO: 4910 - DNA, 23 bp, Artificial
  synthetic
tcacctagcttttcaaaagctga

SEQ ID NO: 4911 - DNA, 23 bp, Artificial
  synthetic
cacctagcttttcaaaagctgac

SEQ ID NO: 4912 - DNA, 23 bp, Artificial
  synthetic
tacatctgaatctatggatcaac

SEQ ID NO: 4913 - DNA, 23 bp, Artificial
  synthetic
acatctgaatctatggatcaact

SEQ ID NO: 4914 - DNA, 23 bp, Artificial
  synthetic
catctgaatctatggatcaacta

SEQ ID NO: 4915 - DNA, 23 bp, Artificial
  synthetic
cttctgaatctatggatcaacta

SEQ ID NO: 4916 - DNA, 23 bp, Artificial
  synthetic
atctgaatctatggatcaactac

SEQ ID NO: 4917 - DNA, 23 bp, Artificial
  synthetic
ttctgaatctatggatcaactac

SEQ ID NO: 4918 - DNA, 23 bp, Artificial
  synthetic
gaatctatggatcaactactaag

SEQ ID NO: 4919 - DNA, 23 bp, Artificial
  synthetic
aatctatggatcaactactaagc

SEQ ID NO: 4920 - DNA, 23 bp, Artificial
  synthetic
atctatggatcaactactaagca

SEQ ID NO: 4921 - DNA, 23 bp, Artificial
  synthetic
tctatggatcaactactaagcaa

SEQ ID NO: 4922 - DNA, 23 bp, Artificial
  synthetic
ctatggatcaactactaagcaaa

SEQ ID NO: 4923 - DNA, 23 bp, Artificial
  synthetic
tatggatcaactactaagcaaaa

SEQ ID NO: 4924 - DNA, 23 bp, Artificial
  synthetic
atggatcaactactaagcaaaaa

SEQ ID NO: 4925 - DNA, 23 bp, Artificial
  synthetic
tggatcaactactaagcaaaaat

SEQ ID NO: 4926 - DNA, 23 bp, Artificial
  synthetic
agaaggagaaaagtcacgagatt

SEQ ID NO: 4927 - DNA, 23 bp, Artificial
  synthetic
aaggagttcaaccctcgttcttt

SEQ ID NO: 4928 - DNA, 23 bp, Artificial
  synthetic
gagttcaaccctcgttctttctc

SEQ ID NO: 4929 - DNA, 23 bp, Artificial
  synthetic
agttcaaccctcgttctttctct

SEQ ID NO: 4930 - DNA, 23 bp, Artificial
  synthetic
gttcaaccctcgttctttctctc

SEQ ID NO: 4931 - DNA, 23 bp, Artificial
  synthetic
ttcaaccctcgttctttctctca

SEQ ID NO: 4932 - DNA, 23 bp, Artificial
  synthetic
tcaaccctcgttctttctctcag

SEQ ID NO: 4933 - DNA, 23 bp, Artificial
  synthetic
ctcgttctttctctcagccaaag

SEQ ID NO: 4934 - DNA, 23 bp, Artificial
  synthetic
tcgttctttctctcagccaaagc

SEQ ID NO: 4935 - DNA, 23 bp, Artificial
  synthetic
acagtcctgtcatacaaggtaat

SEQ ID NO: 4936 - DNA, 23 bp, Artificial
  synthetic
cagtcctgtcatacaaggtaatg

SEQ ID NO: 4937 - DNA, 23 bp, Artificial
  synthetic
cctgtcatacaaggtaatgccag

SEQ ID NO: 4938 - DNA, 23 bp, Artificial
  synthetic
ctgtcatacaaggtaatgccagg

SEQ ID NO: 4939 - DNA, 23 bp, Artificial
  synthetic
tttctactttgccatttccaccg

SEQ ID NO: 4940 - DNA, 23 bp, Artificial
  synthetic
ggaagcacagaaaactagaactt

SEQ ID NO: 4941 - DNA, 23 bp, Artificial
  synthetic
aagcacagaaaactagaacttca

SEQ ID NO: 4942 - DNA, 23 bp, Artificial
  synthetic
gcacagaaaactagaacttcatt

SEQ ID NO: 4943 - DNA, 23 bp, Artificial
  synthetic
cacagaaaactagaacttcattg

SEQ ID NO: 4944 - DNA, 23 bp, Artificial
  synthetic
tctgcttgctgaaactggaagtt

SEQ ID NO: 4945 - DNA, 23 bp, Artificial
  synthetic
tgctgaaactggaagttatttat

SEQ ID NO: 4946 - DNA, 23 bp, Artificial
  synthetic
gctgaaactggaagttatttatt

SEQ ID NO: 4947 - DNA, 23 bp, Artificial
  synthetic
ctgaaactggaagttatttattt

SEQ ID NO: 4948 - DNA, 23 bp, Artificial
  synthetic
ccgaaactggaagttatttattt

SEQ ID NO: 4949 - DNA, 23 bp, Artificial
  synthetic
ccttgagagtcatgaacacatca

SEQ ID NO: 4950 - DNA, 23 bp, Artificial
  synthetic
agagtcatgaacacatcagctag

SEQ ID NO: 4951 - DNA, 23 bp, Artificial
  synthetic
aaagtcatgaacacatcagctag

SEQ ID NO: 4952 - DNA, 23 bp, Artificial
  synthetic
gagtcatgaacacatcagctagc

SEQ ID NO: 4953 - DNA, 23 bp, Artificial
  synthetic
aagtcatgaacacatcagctagc

SEQ ID NO: 4954 - DNA, 23 bp, Artificial
  synthetic
tcatgaacacatcagctagcaac

SEQ ID NO: 4955 - DNA, 23 bp, Artificial
  synthetic
catgaacacatcagctagcaaca

SEQ ID NO: 4956 - DNA, 23 bp, Artificial
  synthetic
acatcagctagcaacagaagtaa

SEQ ID NO: 4957 - DNA, 23 bp, Artificial
  synthetic
atcagctagcaacagaagtaaca

SEQ ID NO: 4958 - DNA, 23 bp, Artificial
  synthetic
agctagcaacagaagtaacaaga

SEQ ID NO: 4959 - DNA, 23 bp, Artificial
  synthetic
gctagcaacagaagtaacaagag

SEQ ID NO: 4960 - DNA, 23 bp, Artificial
  synthetic
acagaagtaacaagagtgattct

SEQ ID NO: 4961 - DNA, 23 bp, Artificial
  synthetic
aaagaagtaacaagagtgattct

SEQ ID NO: 4962 - DNA, 23 bp, Artificial
  synthetic
ttcttgctgctattaccgcttta

SEQ ID NO: 4963 - DNA, 23 bp, Artificial
  synthetic
ttgctgctattaccgctttaaaa

SEQ ID NO: 4964 - DNA, 23 bp, Artificial
  synthetic
cgcccttttactaaacttgacag

SEQ ID NO: 4965 - DNA, 23 bp, Artificial
  synthetic
cccttttactaaacttgacagaa

SEQ ID NO: 4966 - DNA, 23 bp, Artificial
  synthetic
ccttttactaaacttgacagaag

SEQ ID NO: 4967 - DNA, 23 bp, Artificial
  synthetic
tttactaaacttgacagaagttc

SEQ ID NO: 4968 - DNA, 23 bp, Artificial
  synthetic
tactaaacttgacagaagttcag

SEQ ID NO: 4969 - DNA, 23 bp, Artificial
  synthetic
aaacttgacagaagttcagtaaa

SEQ ID NO: 4970 - DNA, 23 bp, Artificial
  synthetic
cttgacagaagttcagtaaattc

SEQ ID NO: 4971 - DNA, 23 bp, Artificial
  synthetic
tgacagaagttcagtaaattctt

SEQ ID NO: 4972 - DNA, 23 bp, Artificial
  synthetic
gacagaagttcagtaaattctta

SEQ ID NO: 4973 - DNA, 23 bp, Artificial
  synthetic
acagaagttcagtaaattcttac

SEQ ID NO: 4974 - DNA, 23 bp, Artificial
  synthetic
cgccaaactgacggattattatt

SEQ ID NO: 4975 - DNA, 23 bp, Artificial
  synthetic
aagttaagggaaaacttttactt

SEQ ID NO: 4976 - DNA, 23 bp, Artificial
  synthetic
agttaagggaaaacttttacttt

SEQ ID NO: 4977 - DNA, 23 bp, Artificial
  synthetic
gttaagggaaaacttttactttg

SEQ ID NO: 4978 - DNA, 23 bp, Artificial
  synthetic
taagggaaaacttttactttgta

SEQ ID NO: 4979 - DNA, 23 bp, Artificial
  synthetic
aagggaaaacttttactttgtag

SEQ ID NO: 4980 - DNA, 23 bp, Artificial
  synthetic
gggaaaacttttactttgtagat

SEQ ID NO: 4981 - DNA, 23 bp, Artificial
  synthetic
ggaaaacttttactttgtagata

SEQ ID NO: 4982 - DNA, 23 bp, Artificial
  synthetic
gaaaaacttttactttgtagata

SEQ ID NO: 4983 - RNA, 21 nt, Artificial
  synthetic
uccgacuuccgguaaagaguc

SEQ ID NO: 4984 - RNA, 21 nt, Artificial
  synthetic
ccgacuuccgguaaagagucc

SEQ ID NO: 4985 - RNA, 21 nt, Artificial
  synthetic
cgacuuccgguaaagaguccc

SEQ ID NO: 4986 - RNA, 21 nt, Artificial
  synthetic
aaugugaaguacaagugaaaa

SEQ ID NO: 4987 - RNA, 21 nt, Artificial
  synthetic
augugaaguacaagugaaaaa

SEQ ID NO: 4988 - RNA, 21 nt, Artificial
  synthetic
gugaaguacaagugaaaaaug

SEQ ID NO: 4989 - RNA, 21 nt, Artificial
  synthetic
caugagaaaaguacagaaucc

SEQ ID NO: 4990 - RNA, 21 nt, Artificial
  synthetic
cacuucucacacuucagauuu

SEQ ID NO: 4991 - RNA, 21 nt, Artificial
  synthetic
acuucucacacuucagauuuc

SEQ ID NO: 4992 - RNA, 21 nt, Artificial
  synthetic
cuucucacacuucagauuuca

SEQ ID NO: 4993 - RNA, 21 nt, Artificial
  synthetic
uucucacacuucagauuucaa

SEQ ID NO: 4994 - RNA, 21 nt, Artificial
  synthetic
ucucacacuucagauuucaac

SEQ ID NO: 4995 - RNA, 21 nt, Artificial
  synthetic
cucacacuucagauuucaacc

SEQ ID NO: 4996 - RNA, 21 nt, Artificial
  synthetic
ucacacuucagauuucaaccc

SEQ ID NO: 4997 - RNA, 21 nt, Artificial
  synthetic
cacacuucagauuucaacccg

SEQ ID NO: 4998 - RNA, 21 nt, Artificial
  synthetic
acuucagauuucaacccgaau

SEQ ID NO: 4999 - RNA, 21 nt, Artificial
  synthetic
ucagaccaaagaguaguuaau

SEQ ID NO: 5000 - RNA, 21 nt, Artificial
  synthetic
cagaccaaagaguaguuaaug

SEQ ID NO: 5001 - RNA, 21 nt, Artificial
  synthetic
cucuacuaugccuaaacgcau

SEQ ID NO: 5002 - RNA, 21 nt, Artificial
  synthetic
ucuacuaugccuaaacgcaug

SEQ ID NO: 5003 - RNA, 21 nt, Artificial
  synthetic
uacuaugccuaaacgcauguc

SEQ ID NO: 5004 - RNA, 21 nt, Artificial
  synthetic
cuucugaaucuauggaucaac

SEQ ID NO: 5005 - RNA, 21 nt, Artificial
  synthetic
uucugaaucuauggaucaacu

SEQ ID NO: 5006 - RNA, 21 nt, Artificial
  synthetic
ucugaaucuauggaucaacua

SEQ ID NO: 5007 - RNA, 21 nt, Artificial
  synthetic
cugaaucuauggaucaacuac

SEQ ID NO: 5008 - RNA, 21 nt, Artificial
  synthetic
ugaaucuauggaucaacuacu

SEQ ID NO: 5009 - RNA, 21 nt, Artificial
  synthetic
gaaucuauggaucaacuacua

SEQ ID NO: 5010 - RNA, 21 nt, Artificial
  synthetic
aaucuauggaucaacuacuaa

SEQ ID NO: 5011 - RNA, 21 nt, Artificial
  synthetic
aucuauggaucaacuacuaaa

SEQ ID NO: 5012 - RNA, 21 nt, Artificial
  synthetic
uauacccaauaccuaugacgc

SEQ ID NO: 5013 - RNA, 21 nt, Artificial
  synthetic
gacauauagagcaguaccaaa

SEQ ID NO: 5014 - RNA, 21 nt, Artificial
  synthetic
auauagagcaguaccaaauau

SEQ ID NO: 5015 - RNA, 21 nt, Artificial
  synthetic
uauagagcaguaccaaauaug

SEQ ID NO: 5016 - RNA, 21 nt, Artificial
  synthetic
auagagcaguaccaaauaugc

SEQ ID NO: 5017 - RNA, 21 nt, Artificial
  synthetic
agagcaguaccaaauaugccc

SEQ ID NO: 5018 - RNA, 21 nt, Artificial
  synthetic
ugucccaaauuaccauacaac

SEQ ID NO: 5019 - RNA, 21 nt, Artificial
  synthetic
ucccaaauuaccauacaacaa

SEQ ID NO: 5020 - RNA, 21 nt, Artificial
  synthetic
aagcccuucuuucuacuuugc

SEQ ID NO: 5021 - RNA, 21 nt, Artificial
  synthetic
cccuucuuucuacuuugccau

SEQ ID NO: 5022 - RNA, 21 nt, Artificial
  synthetic
ccuucuuucuacuuugccauu

SEQ ID NO: 5023 - RNA, 21 nt, Artificial
  synthetic
cuucuuucuacuuugccauuu

SEQ ID NO: 5024 - RNA, 21 nt, Artificial
  synthetic
uucuuucuacuuugccauuuc

SEQ ID NO: 5025 - RNA, 21 nt, Artificial
  synthetic
ucuuucuacuuugccauuucc

SEQ ID NO: 5026 - RNA, 21 nt, Artificial
  synthetic
cuuucuacuuugccauuucca

SEQ ID NO: 5027 - RNA, 21 nt, Artificial
  synthetic
uuucuacuuugccauuuccac

SEQ ID NO: 5028 - RNA, 21 nt, Artificial
  synthetic
uucuacuuugccauuuccacg

SEQ ID NO: 5029 - RNA, 21 nt, Artificial
  synthetic
cauguacagucaggaaugguu

SEQ ID NO: 5030 - RNA, 21 nt, Artificial
  synthetic
auguacagucaggaaugguuc

SEQ ID NO: 5031 - RNA, 21 nt, Artificial
  synthetic
uguacagucaggaaugguucc

SEQ ID NO: 5032 - RNA, 21 nt, Artificial
  synthetic
caggaaugguuccuucucauc

SEQ ID NO: 5033 - RNA, 21 nt, Artificial
  synthetic
gaaugguuccuucucauccaa

SEQ ID NO: 5034 - RNA, 21 nt, Artificial
  synthetic
augguuccuucucauccaacu

SEQ ID NO: 5035 - RNA, 21 nt, Artificial
  synthetic
ugguuccuucucauccaacug

SEQ ID NO: 5036 - RNA, 21 nt, Artificial
  synthetic
guuccuucucauccaacugcc

SEQ ID NO: 5037 - RNA, 21 nt, Artificial
  synthetic
caugcgccaaugaugcuaaug

SEQ ID NO: 5038 - RNA, 21 nt, Artificial
  synthetic
gcgccaaugaugcuaaugacg

SEQ ID NO: 5039 - RNA, 21 nt, Artificial
  synthetic
gccaaugaugcuaaugacgac

SEQ ID NO: 5040 - RNA, 21 nt, Artificial
  synthetic
ccaaugaugcuaaugacgaca

SEQ ID NO: 5041 - RNA, 21 nt, Artificial
  synthetic
augaugcuaaugacgacacag

SEQ ID NO: 5042 - RNA, 21 nt, Artificial
  synthetic
ugaugcuaaugacgacacagc

SEQ ID NO: 5043 - RNA, 21 nt, Artificial
  synthetic
cgcucaaagugcacuacagcc

SEQ ID NO: 5044 - RNA, 21 nt, Artificial
  synthetic
agcccauuccagucucgacaa

SEQ ID NO: 5045 - RNA, 21 nt, Artificial
  synthetic
cccauuccagucucgacaaca

SEQ ID NO: 5046 - RNA, 21 nt, Artificial
  synthetic
caccaccaacagcaguuguaa

SEQ ID NO: 5047 - RNA, 21 nt, Artificial
  synthetic
accaccaacagcaguuguaag

SEQ ID NO: 5048 - RNA, 21 nt, Artificial
  synthetic
ccaccaacagcaguuguaagg

SEQ ID NO: 5049 - RNA, 21 nt, Artificial
  synthetic
accaacagcaguuguaaggcu

SEQ ID NO: 5050 - RNA, 21 nt, Artificial
  synthetic
caacagcaguuguaaggcugc

SEQ ID NO: 5051 - RNA, 21 nt, Artificial
  synthetic
cuucuacugcuucuaccaacu

SEQ ID NO: 5052 - RNA, 21 nt, Artificial
  synthetic
ucuacugcuucuaccaacugg

SEQ ID NO: 5053 - RNA, 21 nt, Artificial
  synthetic
cuacugcuucuaccaacugga

SEQ ID NO: 5054 - RNA, 21 nt, Artificial
  synthetic
cugcuucuaccaacuggaagc

SEQ ID NO: 5055 - RNA, 21 nt, Artificial
  synthetic
caacuggaagcacagaaaacu

SEQ ID NO: 5056 - RNA, 21 nt, Artificial
  synthetic
uugauuucuuguaacauccaa

SEQ ID NO: 5057 - RNA, 21 nt, Artificial
  synthetic
auuucuuguaacauccaauag

SEQ ID NO: 5058 - RNA, 21 nt, Artificial
  synthetic
uucuuguaacauccaauagga

SEQ ID NO: 5059 - RNA, 21 nt, Artificial
  synthetic
ucuuguaacauccaauaggaa

SEQ ID NO: 5060 - RNA, 21 nt, Artificial
  synthetic
uguaacauccaauaggaaugc

SEQ ID NO: 5061 - RNA, 21 nt, Artificial
  synthetic
uaacauccaauaggaaugcua

SEQ ID NO: 5062 - RNA, 21 nt, Artificial
  synthetic
aacauccaauaggaaugcuaa

SEQ ID NO: 5063 - RNA, 21 nt, Artificial
  synthetic
acauccaauaggaaugcuaac

SEQ ID NO: 5064 - RNA, 21 nt, Artificial
  synthetic
cauccaauaggaaugcuaaca

SEQ ID NO: 5065 - RNA, 21 nt, Artificial
  synthetic
aauaggaaugcuaacaguuca

SEQ ID NO: 5066 - RNA, 21 nt, Artificial
  synthetic
auaggaaugcuaacaguucac

SEQ ID NO: 5067 - RNA, 21 nt, Artificial
  synthetic
uaggaaugcuaacaguucacu

SEQ ID NO: 5068 - RNA, 21 nt, Artificial
  synthetic
aggaaugcuaacaguucacuu

SEQ ID NO: 5069 - RNA, 21 nt, Artificial
  synthetic
ggaaugcuaacaguucacuug

SEQ ID NO: 5070 - RNA, 21 nt, Artificial
  synthetic
gaaugcuaacaguucacuugc

SEQ ID NO: 5071 - RNA, 21 nt, Artificial
  synthetic
gcuaacaguucacuugcagug

SEQ ID NO: 5072 - RNA, 21 nt, Artificial
  synthetic
caguucacuugcaguggaaga

SEQ ID NO: 5073 - RNA, 21 nt, Artificial
  synthetic
gaccgaguagaggcauuuagg

SEQ ID NO: 5074 - RNA, 21 nt, Artificial
  synthetic
accgaguagaggcauuuagga

SEQ ID NO: 5075 - RNA, 21 nt, Artificial
  synthetic
ggcuauuccauaauuccauau

SEQ ID NO: 5076 - RNA, 21 nt, Artificial
  synthetic
ugccgaaacuggaaguuauuu

SEQ ID NO: 5077 - RNA, 21 nt, Artificial
  synthetic
ccgaaacuggaaguuauuuau

SEQ ID NO: 5078 - RNA, 21 nt, Artificial
  synthetic
cgaaacuggaaguuauuuauu

SEQ ID NO: 5079 - RNA, 21 nt, Artificial
  synthetic
gaaacuggaaguuauuuauuu

SEQ ID NO: 5080 - RNA, 21 nt, Artificial
  synthetic
aaacuggaaguuauuuauuuu

SEQ ID NO: 5081 - RNA, 21 nt, Artificial
  synthetic
uaauaacccuugaaagucaug

SEQ ID NO: 5082 - RNA, 21 nt, Artificial
  synthetic
aauaacccuugaaagucauga

SEQ ID NO: 5083 - RNA, 21 nt, Artificial
  synthetic
aacccuugaaagucaugaaca

SEQ ID NO: 5084 - RNA, 21 nt, Artificial
  synthetic
cuugaaagucaugaacacauc

SEQ ID NO: 5085 - RNA, 21 nt, Artificial
  synthetic
agucaugaacacaucagcuag

SEQ ID NO: 5086 - RNA, 21 nt, Artificial
  synthetic
gucaugaacacaucagcuagc

SEQ ID NO: 5087 - RNA, 21 nt, Artificial
  synthetic
ucaugaacacaucagcuagca

SEQ ID NO: 5088 - RNA, 21 nt, Artificial
  synthetic
caugaacacaucagcuagcaa

SEQ ID NO: 5089 - RNA, 21 nt, Artificial
  synthetic
caugaacacaucagcuagcaa

SEQ ID NO: 5090 - RNA, 21 nt, Artificial
  synthetic
augaacacaucagcuagcaaa

SEQ ID NO: 5091 - RNA, 21 nt, Artificial
  synthetic
ugaacacaucagcuagcaaaa

SEQ ID NO: 5092 - RNA, 21 nt, Artificial
  synthetic
gaacacaucagcuagcaaaag

SEQ ID NO: 5093 - RNA, 21 nt, Artificial
  synthetic
aacacaucagcuagcaaaaga

SEQ ID NO: 5094 - RNA, 21 nt, Artificial
  synthetic
caucagcuagcaaaagaagua

SEQ ID NO: 5095 - RNA, 21 nt, Artificial
  synthetic
cuagcaaaagaaguaacaaga

SEQ ID NO: 5096 - RNA, 21 nt, Artificial
  synthetic
guaacaagagugauucuugcu

SEQ ID NO: 5097 - RNA, 21 nt, Artificial
  synthetic
uaacaagagugauucuugcug

SEQ ID NO: 5098 - RNA, 21 nt, Artificial
  synthetic
aacaagagugauucuugcugc

SEQ ID NO: 5099 - RNA, 21 nt, Artificial
  synthetic
agagugauucuugcugcuauu

SEQ ID NO: 5100 - RNA, 21 nt, Artificial
  synthetic
gagugauucuugcugcuauua

SEQ ID NO: 5101 - RNA, 21 nt, Artificial
  synthetic
gugauucuugcugcuauuacu

SEQ ID NO: 5102 - RNA, 21 nt, Artificial
  synthetic
uuggaacgcccuuuuacuaaa

SEQ ID NO: 5103 - RNA, 21 nt, Artificial
  synthetic
uggaacgcccuuuuacuaaac

SEQ ID NO: 5104 - RNA, 21 nt, Artificial
  synthetic
gaacgcccuuuuacuaaacuu

SEQ ID NO: 5105 - RNA, 21 nt, Artificial
  synthetic
aacgcccuuuuacuaaacuug

SEQ ID NO: 5106 - RNA, 21 nt, Artificial
  synthetic
acgcccuuuuacuaaacuuga

SEQ ID NO: 5107 - RNA, 21 nt, Artificial
  synthetic
cgcccuuuuacuaaacuugac

SEQ ID NO: 5108 - RNA, 21 nt, Artificial
  synthetic
guuucaguaaauucuuaccgu

SEQ ID NO: 5109 - RNA, 21 nt, Artificial
  synthetic
uuucaguaaauucuuaccguc

SEQ ID NO: 5110 - RNA, 21 nt, Artificial
  synthetic
uucaguaaauucuuaccguca

SEQ ID NO: 5111 - RNA, 21 nt, Artificial
  synthetic
ucaguaaauucuuaccgucaa

SEQ ID NO: 5112 - RNA, 21 nt, Artificial
  synthetic
caguaaauucuuaccgucaaa

SEQ ID NO: 5113 - RNA, 21 nt, Artificial
  synthetic
aguaaauucuuaccgucaaac

SEQ ID NO: 5114 - RNA, 21 nt, Artificial
  synthetic
guaaauucuuaccgucaaacu

SEQ ID NO: 5115 - RNA, 21 nt, Artificial
  synthetic
uaaauucuuaccgucaaacug

SEQ ID NO: 5116 - RNA, 21 nt, Artificial
  synthetic
aaauucuuaccgucaaacuga

SEQ ID NO: 5117 - RNA, 21 nt, Artificial
  synthetic
aauucuuaccgucaaacugac

SEQ ID NO: 5118 - RNA, 21 nt, Artificial
  synthetic
auucuuaccgucaaacugacg

SEQ ID NO: 5119 - RNA, 21 nt, Artificial
  synthetic
uucuuaccgucaaacugacgg

SEQ ID NO: 5120 - RNA, 21 nt, Artificial
  synthetic
ucuuaccgucaaacugacgga

SEQ ID NO: 5121 - RNA, 21 nt, Artificial
  synthetic
cuuaccgucaaacugacggau

SEQ ID NO: 5122 - RNA, 21 nt, Artificial
  synthetic
uuaccgucaaacugacggauu

SEQ ID NO: 5123 - RNA, 21 nt, Artificial
  synthetic
uaccgucaaacugacggauua

SEQ ID NO: 5124 - RNA, 21 nt, Artificial
  synthetic
uaccgucaaacugacggauua

SEQ ID NO: 5125 - RNA, 21 nt, Artificial
  synthetic
accgucaaacugacggauuau

SEQ ID NO: 5126 - RNA, 21 nt, Artificial
  synthetic
aacugacggauuauuauuuau

SEQ ID NO: 5127 - RNA, 21 nt, Artificial
  synthetic
aguuugaugaggugaucacug

SEQ ID NO: 5128 - RNA, 21 nt, Artificial
  synthetic
acugucuacagugguucaacu

SEQ ID NO: 5129 - RNA, 21 nt, Artificial
  synthetic
cugucuacagugguucaacuu

SEQ ID NO: 5130 - RNA, 21 nt, Artificial
  synthetic
cuacagugguucaacuuuuaa

SEQ ID NO: 5131 - RNA, 21 nt, Artificial
  synthetic
uacagugguucaacuuuuaag

SEQ ID NO: 5132 - RNA, 21 nt, Artificial
  synthetic
ucaacuuuuaaguuaagggaa

SEQ ID NO: 5133 - RNA, 21 nt, Artificial
  synthetic
aacuuuuaaguuaagggaaaa

SEQ ID NO: 5134 - RNA, 21 nt, Artificial
  synthetic
aaaaacuuuuacuuuguagau

SEQ ID NO: 5135 - RNA, 21 nt, Artificial
  synthetic
cucagucuacgauuucuuuug

SEQ ID NO: 5136 - RNA, 21 nt, Artificial
  synthetic
ucagucuacgauuucuuuuga

SEQ ID NO: 5137 - RNA, 21 nt, Artificial
  synthetic
cagucuacgauuucuuuugau

SEQ ID NO: 5138 - RNA, 21 nt, Artificial
  synthetic
caugagaaaaguacagaaucc

SEQ ID NO: 5139 - RNA, 21 nt, Artificial
  synthetic
caugagaaaaguacagaaucc

SEQ ID NO: 5140 - RNA, 21 nt, Artificial
  synthetic
aaauguucagacuuuguugug

SEQ ID NO: 5141 - RNA, 21 nt, Artificial
  synthetic
ugcuaucagugcuaaagugaa

SEQ ID NO: 5142 - RNA, 21 nt, Artificial
  synthetic
cguaugauagcaguuuaucuu

SEQ ID NO: 5143 - RNA, 21 nt, Artificial
  synthetic
guaugauagcaguuuaucuuc

SEQ ID NO: 5144 - RNA, 21 nt, Artificial
  synthetic
gauaacucagaagaauuuuua

SEQ ID NO: 5145 - RNA, 21 nt, Artificial
  synthetic
auccacuucucacacuucaga

SEQ ID NO: 5146 - RNA, 21 nt, Artificial
  synthetic
ucucacacuucagauuucaac

SEQ ID NO: 5147 - RNA, 21 nt, Artificial
  synthetic
cucuacuaugccuaaacgcau

SEQ ID NO: 5148 - RNA, 21 nt, Artificial
  synthetic
ucuacuaugccuaaacgcaug

SEQ ID NO: 5149 - RNA, 21 nt, Artificial
  synthetic
ucgaaaucacagaguuucugc

SEQ ID NO: 5150 - RNA, 21 nt, Artificial
  synthetic
cgaaaucacagaguuucugcu

SEQ ID NO: 5151 - RNA, 21 nt, Artificial
  synthetic
guucuacuucugaaucuaugg

SEQ ID NO: 5152 - RNA, 21 nt, Artificial
  synthetic
uucuacuucugaaucuaugga

SEQ ID NO: 5153 - RNA, 21 nt, Artificial
  synthetic
ucuacuucugaaucuauggau

SEQ ID NO: 5154 - RNA, 21 nt, Artificial
  synthetic
cuacuucugaaucuauggauc

SEQ ID NO: 5155 - RNA, 21 nt, Artificial
  synthetic
ugaaucuauggaucaacuacu

SEQ ID NO: 5156 - RNA, 21 nt, Artificial
  synthetic
ugaaucuauggaucaacuacu

SEQ ID NO: 5157 - RNA, 21 nt, Artificial
  synthetic
acuacuaaacaaaaauagaga

SEQ ID NO: 5158 - RNA, 21 nt, Artificial
  synthetic
accaagugcuaaggauucuuu

SEQ ID NO: 5159 - RNA, 21 nt, Artificial
  synthetic
uuaggaaaucaacauugaauc

SEQ ID NO: 5160 - RNA, 21 nt, Artificial
  synthetic
agccaacuccaguuuauacuc

SEQ ID NO: 5161 - RNA, 21 nt, Artificial
  synthetic
uucuucagcaacucaguacgg

SEQ ID NO: 5162 - RNA, 21 nt, Artificial
  synthetic
uuucuacuuugccauuuccac

SEQ ID NO: 5163 - RNA, 21 nt, Artificial
  synthetic
uucuacuuugccauuuccacg

SEQ ID NO: 5164 - RNA, 21 nt, Artificial
  synthetic
ucuuguaacauccaauaggaa

SEQ ID NO: 5165 - RNA, 21 nt, Artificial
  synthetic
ccgaaacuggaaguuauuuau

SEQ ID NO: 5166 - RNA, 21 nt, Artificial
  synthetic
ccgaaacuggaaguuauuuau

SEQ ID NO: 5167 - RNA, 21 nt, Artificial
  synthetic
ccgaaacuggaaguuauuuau

SEQ ID NO: 5168 - RNA, 21 nt, Artificial
  synthetic
aaacuggaaguuauuuauuuu

SEQ ID NO: 5169 - RNA, 21 nt, Artificial
  synthetic
cuugaaagucaugaacacauc

SEQ ID NO: 5170 - RNA, 21 nt, Artificial
  synthetic
cuugaaagucaugaacacauc

SEQ ID NO: 5171 - RNA, 21 nt, Artificial
  synthetic
agucaugaacacaucagcuag

SEQ ID NO: 5172 - RNA, 21 nt, Artificial
  synthetic
agucaugaacacaucagcuag

SEQ ID NO: 5173 - RNA, 21 nt, Artificial
  synthetic
agucaugaacacaucagcuag

SEQ ID NO: 5174 - RNA, 21 nt, Artificial
  synthetic
gucaugaacacaucagcuagc

SEQ ID NO: 5175 - RNA, 21 nt, Artificial
  synthetic
gucaugaacacaucagcuagc

SEQ ID NO: 5176 - RNA, 21 nt, Artificial
  synthetic
caugaacacaucagcuagcaa

SEQ ID NO: 5177 - RNA, 21 nt, Artificial
  synthetic
agagugauucuugcugcuauu

SEQ ID NO: 5178 - RNA, 21 nt, Artificial
  synthetic
agagugauucuugcugcuauu

SEQ ID NO: 5179 - RNA, 21 nt, Artificial
  synthetic
gugauucuugcugcuauuacu

SEQ ID NO: 5180 - RNA, 21 nt, Artificial
  synthetic
gugauucuugcugcuauuacu

SEQ ID NO: 5181 - RNA, 21 nt, Artificial
  synthetic
cgcccuuuuacuaaacuugac

SEQ ID NO: 5182 - RNA, 21 nt, Artificial
  synthetic
cgcccuuuuacuaaacuugac

SEQ ID NO: 5183 - RNA, 21 nt, Artificial
  synthetic
uaccgucaaacugacggauua

SEQ ID NO: 5184 - RNA, 21 nt, Artificial
  synthetic
acugucuacagugguucaacu

SEQ ID NO: 5185 - RNA, 21 nt, Artificial
  synthetic
acugucuacagugguucaacu

SEQ ID NO: 5186 - RNA, 21 nt, Artificial
  synthetic
agugguucaacuuuuaaguua

SEQ ID NO: 5187 - RNA, 21 nt, Artificial
  synthetic
gugguucaacuuuuaaguuaa

SEQ ID NO: 5188 - RNA, 21 nt, Artificial
  synthetic
uaagggaaaaacuuuuacuuu

SEQ ID NO: 5189 - RNA, 21 nt, Artificial
  synthetic
ccucagccuacgauuucuuuu

SEQ ID NO: 5190 - RNA, 21 nt, Artificial
  synthetic
cucagccuacgauuucuuuug

SEQ ID NO: 5191 - RNA, 21 nt, Artificial
  synthetic
ucagccuacgauuucuuuuga

SEQ ID NO: 5192 - RNA, 21 nt, Artificial
  synthetic
gaggaugguucauauacuuac

SEQ ID NO: 5193 - RNA, 21 nt, Artificial
  synthetic
gaggaugguucauauacuuau

SEQ ID NO: 5194 - RNA, 21 nt, Artificial
  synthetic
aggaugguucauauacuuacg

SEQ ID NO: 5195 - RNA, 21 nt, Artificial
  synthetic
aaugugaaguacaagugaaaa

SEQ ID NO: 5196 - RNA, 21 nt, Artificial
  synthetic
aaugugaaguacaagugaaaa

SEQ ID NO: 5197 - RNA, 21 nt, Artificial
  synthetic
gugaaguacaagugaaaaacg

SEQ ID NO: 5198 - RNA, 21 nt, Artificial
  synthetic
aaggaguuuuuaaaacauaca

SEQ ID NO: 5199 - RNA, 21 nt, Artificial
  synthetic
aggaguuuuuaaaacauacag

SEQ ID NO: 5200 - RNA, 21 nt, Artificial
  synthetic
aaacauacaguccuaagugug

SEQ ID NO: 5201 - RNA, 21 nt, Artificial
  synthetic
aacauacaguccuaaguguga

SEQ ID NO: 5202 - RNA, 21 nt, Artificial
  synthetic
acauacaguccuaagugugac

SEQ ID NO: 5203 - RNA, 21 nt, Artificial
  synthetic
gcugcacaugagaaaaguaca

SEQ ID NO: 5204 - RNA, 21 nt, Artificial
  synthetic
cugcacaugagaaaaguacag

SEQ ID NO: 5205 - RNA, 21 nt, Artificial
  synthetic
auggagaguguuuuguucaaa

SEQ ID NO: 5206 - RNA, 21 nt, Artificial
  synthetic
ggagaguguuuuguucaaaug

SEQ ID NO: 5207 - RNA, 21 nt, Artificial
  synthetic
uuuguucaaaugcucagacuu

SEQ ID NO: 5208 - RNA, 21 nt, Artificial
  synthetic
uguucaaaugcucagacuucg

SEQ ID NO: 5209 - RNA, 21 nt, Artificial
  synthetic
guucaaaugcucagacuucgu

SEQ ID NO: 5210 - RNA, 21 nt, Artificial
  synthetic
uucaaaugcucagacuucguu

SEQ ID NO: 5211 - RNA, 21 nt, Artificial
  synthetic
ucaaaugcucagacuucguug

SEQ ID NO: 5212 - RNA, 21 nt, Artificial
  synthetic
caaaugcucagacuucguugu

SEQ ID NO: 5213 - RNA, 21 nt, Artificial
  synthetic
aaaugcucagacuucguugug

SEQ ID NO: 5214 - RNA, 21 nt, Artificial
  synthetic
aaugcucagacuucguugugg

SEQ ID NO: 5215 - RNA, 21 nt, Artificial
  synthetic
acauguuucgauauaaugaag

SEQ ID NO: 5216 - RNA, 21 nt, Artificial
  synthetic
uuuaucuucauauacgguucc

SEQ ID NO: 5217 - RNA, 21 nt, Artificial
  synthetic
agggacaacucagaagaauuu

SEQ ID NO: 5218 - RNA, 21 nt, Artificial
  synthetic
gggacaacucagaagaauuuc

SEQ ID NO: 5219 - RNA, 21 nt, Artificial
  synthetic
ggacaacucagaagaauuucu

SEQ ID NO: 5220 - RNA, 21 nt, Artificial
  synthetic
gacaacucagaagaauuucuu

SEQ ID NO: 5221 - RNA, 21 nt, Artificial
  synthetic
ugcuucucacacuucagauuu

SEQ ID NO: 5222 - RNA, 21 nt, Artificial
  synthetic
gcuucucacacuucagauuuc

SEQ ID NO: 5223 - RNA, 21 nt, Artificial
  synthetic
cuucucacacuucagauuuca

SEQ ID NO: 5224 - RNA, 21 nt, Artificial
  synthetic
cuucucacacuucagauuuca

SEQ ID NO: 5225 - RNA, 21 nt, Artificial
  synthetic
uucucacacuucagauuucaa

SEQ ID NO: 5226 - RNA, 21 nt, Artificial
  synthetic
uucucacacuucagauuucaa

SEQ ID NO: 5227 - RNA, 21 nt, Artificial
  synthetic
ucagaccaaagaguaguuaau

SEQ ID NO: 5228 - RNA, 21 nt, Artificial
  synthetic
ucagaccaaagaguaguuaau

SEQ ID NO: 5229 - RNA, 21 nt, Artificial
  synthetic
cagaccaaagaguaguuaaug

SEQ ID NO: 5230 - RNA, 21 nt, Artificial
  synthetic
cagaccaaagaguaguuaauu

SEQ ID NO: 5231 - RNA, 21 nt, Artificial
  synthetic
uagaauuuguaucccacaauc

SEQ ID NO: 5232 - RNA, 21 nt, Artificial
  synthetic
agaauuuguaucccacaaucc

SEQ ID NO: 5233 - RNA, 21 nt, Artificial
  synthetic
gaauuuguaucccacaauccc

SEQ ID NO: 5234 - RNA, 21 nt, Artificial
  synthetic
gugaaacaucaccuagcuuuu

SEQ ID NO: 5235 - RNA, 21 nt, Artificial
  synthetic
ugaaacaucaccuagcuuuuc

SEQ ID NO: 5236 - RNA, 21 nt, Artificial
  synthetic
gaaacaucaccuagcuuuuca

SEQ ID NO: 5237 - RNA, 21 nt, Artificial
  synthetic
aaacaucaccuagcuuuucaa

SEQ ID NO: 5238 - RNA, 21 nt, Artificial
  synthetic
aacaucaccuagcuuuucaaa

SEQ ID NO: 5239 - RNA, 21 nt, Artificial
  synthetic
acaucaccuagcuuuucaaaa

SEQ ID NO: 5240 - RNA, 21 nt, Artificial
  synthetic
caucaccuagcuuuucaaaag

SEQ ID NO: 5241 - RNA, 21 nt, Artificial
  synthetic
aucaccuagcuuuucaaaagc

SEQ ID NO: 5242 - RNA, 21 nt, Artificial
  synthetic
ucaccuagcuuuucaaaagcu

SEQ ID NO: 5243 - RNA, 21 nt, Artificial
  synthetic
caccuagcuuuucaaaagcug

SEQ ID NO: 5244 - RNA, 21 nt, Artificial
  synthetic
accuagcuuuucaaaagcuga

SEQ ID NO: 5245 - RNA, 21 nt, Artificial
  synthetic
ccuagcuuuucaaaagcugac

SEQ ID NO: 5246 - RNA, 21 nt, Artificial
  synthetic
caucugaaucuauggaucaac

SEQ ID NO: 5247 - RNA, 21 nt, Artificial
  synthetic
aucugaaucuauggaucaacu

SEQ ID NO: 5248 - RNA, 21 nt, Artificial
  synthetic
ucugaaucuauggaucaacua

SEQ ID NO: 5249 - RNA, 21 nt, Artificial
  synthetic
ucugaaucuauggaucaacua

SEQ ID NO: 5250 - RNA, 21 nt, Artificial
  synthetic
cugaaucuauggaucaacuac

SEQ ID NO: 5251 - RNA, 21 nt, Artificial
  synthetic
cugaaucuauggaucaacuau

SEQ ID NO: 5252 - RNA, 21 nt, Artificial
  synthetic
aucuauggaucaacuacuaag

SEQ ID NO: 5253 - RNA, 21 nt, Artificial
  synthetic
ucuauggaucaacuacuaagc

SEQ ID NO: 5254 - RNA, 21 nt, Artificial
  synthetic
cuauggaucaacuacuaagca

SEQ ID NO: 5255 - RNA, 21 nt, Artificial
  synthetic
uauggaucaacuacuaagcaa

SEQ ID NO: 5256 - RNA, 21 nt, Artificial
  synthetic
auggaucaacuacuaagcaaa

SEQ ID NO: 5257 - RNA, 21 nt, Artificial
  synthetic
uggaucaacuacuaagcaaaa

SEQ ID NO: 5258 - RNA, 21 nt, Artificial
  synthetic
ggaucaacuacuaagcaaaaa

SEQ ID NO: 5259 - RNA, 21 nt, Artificial
  synthetic
gaucaacuacuaagcaaaaau

SEQ ID NO: 5260 - RNA, 21 nt, Artificial
  synthetic
aaggagaaaagucacgagauu

SEQ ID NO: 5261 - RNA, 21 nt, Artificial
  synthetic
ggaguucaacccucguucuuu

SEQ ID NO: 5262 - RNA, 21 nt, Artificial
  synthetic
guucaacccucguucuuucuc

SEQ ID NO: 5263 - RNA, 21 nt, Artificial
  synthetic
uucaacccucguucuuucucu

SEQ ID NO: 5264 - RNA, 21 nt, Artificial
  synthetic
ucaacccucguucuuucucuc

SEQ ID NO: 5265 - RNA, 21 nt, Artificial
  synthetic
caacccucguucuuucucuca

SEQ ID NO: 5266 - RNA, 21 nt, Artificial
  synthetic
aacccucguucuuucucucag

SEQ ID NO: 5267 - RNA, 21 nt, Artificial
  synthetic
cguucuuucucucagccaaag

SEQ ID NO: 5268 - RNA, 21 nt, Artificial
  synthetic
guucuuucucucagccaaagc

SEQ ID NO: 5269 - RNA, 21 nt, Artificial
  synthetic
aguccugucauacaagguaau

SEQ ID NO: 5270 - RNA, 21 nt, Artificial
  synthetic
guccugucauacaagguaaug

SEQ ID NO: 5271 - RNA, 21 nt, Artificial
  synthetic
ugucauacaagguaaugccag

SEQ ID NO: 5272 - RNA, 21 nt, Artificial
  synthetic
gucauacaagguaaugccagg

SEQ ID NO: 5273 - RNA, 21 nt, Artificial
  synthetic
ucuacuuugccauuuccaccg

SEQ ID NO: 5274 - RNA, 21 nt, Artificial
  synthetic
aagcacagaaaacuagaacuu

SEQ ID NO: 5275 - RNA, 21 nt, Artificial
  synthetic
gcacagaaaacuagaacuuca

SEQ ID NO: 5276 - RNA, 21 nt, Artificial
  synthetic
acagaaaacuagaacuucauu

SEQ ID NO: 5277 - RNA, 21 nt, Artificial
  synthetic
cagaaaacuagaacuucauug

SEQ ID NO: 5278 - RNA, 21 nt, Artificial
  synthetic
ugcuugcugaaacuggaaguu

SEQ ID NO: 5279 - RNA, 21 nt, Artificial
  synthetic
cugaaacuggaaguuauuuau

SEQ ID NO: 5280 - RNA, 21 nt, Artificial
  synthetic
ugaaacuggaaguuauuuauu

SEQ ID NO: 5281 - RNA, 21 nt, Artificial
  synthetic
gaaacuggaaguuauuuauuu

SEQ ID NO: 5282 - RNA, 21 nt, Artificial
  synthetic
gaaacuggaaguuauuuauuu

SEQ ID NO: 5283 - RNA, 21 nt, Artificial
  synthetic
uugagagucaugaacacauca

SEQ ID NO: 5284 - RNA, 21 nt, Artificial
  synthetic
agucaugaacacaucagcuag

SEQ ID NO: 5285 - RNA, 21 nt, Artificial
  synthetic
agucaugaacacaucagcuau

SEQ ID NO: 5286 - RNA, 21 nt, Artificial
  synthetic
gucaugaacacaucagcuagc

SEQ ID NO: 5287 - RNA, 21 nt, Artificial
  synthetic
gucaugaacacaucagcuagu

SEQ ID NO: 5288 - RNA, 21 nt, Artificial
  synthetic
augaacacaucagcuagcaac

SEQ ID NO: 5289 - RNA, 21 nt, Artificial
  synthetic
ugaacacaucagcuagcaaca

SEQ ID NO: 5290 - RNA, 21 nt, Artificial
  synthetic
aucagcuagcaacagaaguaa

SEQ ID NO: 5291 - RNA, 21 nt, Artificial
  synthetic
cagcuagcaacagaaguaaca

SEQ ID NO: 5292 - RNA, 21 nt, Artificial
  synthetic
cuagcaacagaaguaacaaga

SEQ ID NO: 5293 - RNA, 21 nt, Artificial
  synthetic
uagcaacagaaguaacaagag

SEQ ID NO: 5294 - RNA, 21 nt, Artificial
  synthetic
agaaguaacaagagugauucu

SEQ ID NO: 5295 - RNA, 21 nt, Artificial
  synthetic
agaaguaacaagagugauucu

SEQ ID NO: 5296 - RNA, 21 nt, Artificial
  synthetic
cuugcugcuauuaccgcuuua

SEQ ID NO: 5297 - RNA, 21 nt, Artificial
  synthetic
gcugcuauuaccgcuuuaaaa

SEQ ID NO: 5298 - RNA, 21 nt, Artificial
  synthetic
cccuuuuacuaaacuugacag

SEQ ID NO: 5299 - RNA, 21 nt, Artificial
  synthetic
cuuuuacuaaacuugacagaa

SEQ ID NO: 5300 - RNA, 21 nt, Artificial
  synthetic
uuuuacuaaacuugacagaag

SEQ ID NO: 5301 - RNA, 21 nt, Artificial
  synthetic
uacuaaacuugacagaaguuc

SEQ ID NO: 5302 - RNA, 21 nt, Artificial
  synthetic
cuaaacuugacagaaguucag

SEQ ID NO: 5303 - RNA, 21 nt, Artificial
  synthetic
acuugacagaaguucaguaaa

SEQ ID NO: 5304 - RNA, 21 nt, Artificial
  synthetic
ugacagaaguucaguaaauuc

SEQ ID NO: 5305 - RNA, 21 nt, Artificial
  synthetic
acagaaguucaguaaauucuu

SEQ ID NO: 5306 - RNA, 21 nt, Artificial
  synthetic
cagaaguucaguaaauucuua

SEQ ID NO: 5307 - RNA, 21 nt, Artificial
  synthetic
agaaguucaguaaauucuuac

SEQ ID NO: 5308 - RNA, 21 nt, Artificial
  synthetic
ccaaacugacggauuauuauu

SEQ ID NO: 5309 - RNA, 21 nt, Artificial
  synthetic
guuaagggaaaacuuuuacuu

SEQ ID NO: 5310 - RNA, 21 nt, Artificial
  synthetic
uuaagggaaaacuuuuacuuu

SEQ ID NO: 5311 - RNA, 21 nt, Artificial
  synthetic
uaagggaaaacuuuuacuuug

SEQ ID NO: 5312 - RNA, 21 nt, Artificial
  synthetic
agggaaaacuuuuacuuugua

SEQ ID NO: 5313 - RNA, 21 nt, Artificial
  synthetic
gggaaaacuuuuacuuuguag

SEQ ID NO: 5314 - RNA, 21 nt, Artificial
  synthetic
gaaaacuuuuacuuuguagau

SEQ ID NO: 5315 - RNA, 21 nt, Artificial
  synthetic
aaaacuuuuacuuuguagaua

SEQ ID NO: 5316 - RNA, 21 nt, Artificial
  synthetic
aaaacuuuuacuuuguagaua

SEQ ID NO: 5317 - RNA, 23 nt, Artificial
  synthetic
gacucuuuaccggaagucggagg

SEQ ID NO: 5318 - RNA, 23 nt, Artificial
  synthetic
ggacucuuuaccggaagucggag

SEQ ID NO: 5319 - RNA, 23 nt, Artificial
  synthetic
gggacucuuuaccggaagucgga

SEQ ID NO: 5320 - RNA, 23 nt, Artificial
  synthetic
uuuucacuuguacuucacauuug

SEQ ID NO: 5321 - RNA, 23 nt, Artificial
  synthetic
uuuuucacuuguacuucacauuu

SEQ ID NO: 5322 - RNA, 23 nt, Artificial
  synthetic
cauuuuucacuuguacuucacau

SEQ ID NO: 5323 - RNA, 23 nt, Artificial
  synthetic
ggauucuguacuuuucucaugug

SEQ ID NO: 5324 - RNA, 23 nt, Artificial
  synthetic
aaaucugaagugugagaagugga

SEQ ID NO: 5325 - RNA, 23 nt, Artificial
  synthetic
gaaaucugaagugugagaagugg

SEQ ID NO: 5326 - RNA, 23 nt, Artificial
  synthetic
ugaaaucugaagugugagaagug

SEQ ID NO: 5327 - RNA, 23 nt, Artificial
  synthetic
uugaaaucugaagugugagaagu

SEQ ID NO: 5328 - RNA, 23 nt, Artificial
  synthetic
guugaaaucugaagugugagaag

SEQ ID NO: 5329 - RNA, 23 nt, Artificial
  synthetic
gguugaaaucugaagugugagaa

SEQ ID NO: 5330 - RNA, 23 nt, Artificial
  synthetic
ggguugaaaucugaagugugaga

SEQ ID NO: 5331 - RNA, 23 nt, Artificial
  synthetic
cggguugaaaucugaagugugag

SEQ ID NO: 5332 - RNA, 23 nt, Artificial
  synthetic
auucggguugaaaucugaagugu

SEQ ID NO: 5333 - RNA, 23 nt, Artificial
  synthetic
auuaacuacucuuuggucugaac

SEQ ID NO: 5334 - RNA, 23 nt, Artificial
  synthetic
cauuaacuacucuuuggucugaa

SEQ ID NO: 5335 - RNA, 23 nt, Artificial
  synthetic
augcguuuaggcauaguagagac

SEQ ID NO: 5336 - RNA, 23 nt, Artificial
  synthetic
caugcguuuaggcauaguagaga

SEQ ID NO: 5337 - RNA, 23 nt, Artificial
  synthetic
gacaugcguuuaggcauaguaga

SEQ ID NO: 5338 - RNA, 23 nt, Artificial
  synthetic
guugauccauagauucagaagua

SEQ ID NO: 5339 - RNA, 23 nt, Artificial
  synthetic
aguugauccauagauucagaagu

SEQ ID NO: 5340 - RNA, 23 nt, Artificial
  synthetic
uaguugauccauagauucagaag

SEQ ID NO: 5341 - RNA, 23 nt, Artificial
  synthetic
guaguugauccauagauucagaa

SEQ ID NO: 5342 - RNA, 23 nt, Artificial
  synthetic
aguaguugauccauagauucaga

SEQ ID NO: 5343 - RNA, 23 nt, Artificial
  synthetic
uaguaguugauccauagauucag

SEQ ID NO: 5344 - RNA, 23 nt, Artificial
  synthetic
uuaguaguugauccauagauuca

SEQ ID NO: 5345 - RNA, 23 nt, Artificial
  synthetic
uuuaguaguugauccauagauuc

SEQ ID NO: 5346 - RNA, 23 nt, Artificial
  synthetic
gcgucauagguauuggguauaaa

SEQ ID NO: 5347 - RNA, 23 nt, Artificial
  synthetic
uuugguacugcucuauaugucuu

SEQ ID NO: 5348 - RNA, 23 nt, Artificial
  synthetic
auauuugguacugcucuauaugu

SEQ ID NO: 5349 - RNA, 23 nt, Artificial
  synthetic
cauauuugguacugcucuauaug

SEQ ID NO: 5350 - RNA, 23 nt, Artificial
  synthetic
gcauauuugguacugcucuauau

SEQ ID NO: 5351 - RNA, 23 nt, Artificial
  synthetic
gggcauauuugguacugcucuau

SEQ ID NO: 5352 - RNA, 23 nt, Artificial
  synthetic
guuguaugguaauuugggacaug

SEQ ID NO: 5353 - RNA, 23 nt, Artificial
  synthetic
uuguuguaugguaauuugggaca

SEQ ID NO: 5354 - RNA, 23 nt, Artificial
  synthetic
gcaaaguagaaagaagggcuugu

SEQ ID NO: 5355 - RNA, 23 nt, Artificial
  synthetic
auggcaaaguagaaagaagggcu

SEQ ID NO: 5356 - RNA, 23 nt, Artificial
  synthetic
aauggcaaaguagaaagaagggc

SEQ ID NO: 5357 - RNA, 23 nt, Artificial
  synthetic
aaauggcaaaguagaaagaaggg

SEQ ID NO: 5358 - RNA, 23 nt, Artificial
  synthetic
gaaauggcaaaguagaaagaagg

SEQ ID NO: 5359 - RNA, 23 nt, Artificial
  synthetic
ggaaauggcaaaguagaaagaag

SEQ ID NO: 5360 - RNA, 23 nt, Artificial
  synthetic
uggaaauggcaaaguagaaagaa

SEQ ID NO: 5361 - RNA, 23 nt, Artificial
  synthetic
guggaaauggcaaaguagaaaga

SEQ ID NO: 5362 - RNA, 23 nt, Artificial
  synthetic
cguggaaauggcaaaguagaaag

SEQ ID NO: 5363 - RNA, 23 nt, Artificial
  synthetic
aaccauuccugacuguacaugag

SEQ ID NO: 5364 - RNA, 23 nt, Artificial
  synthetic
gaaccauuccugacuguacauga

SEQ ID NO: 5365 - RNA, 23 nt, Artificial
  synthetic
ggaaccauuccugacuguacaug

SEQ ID NO: 5366 - RNA, 23 nt, Artificial
  synthetic
gaugagaaggaaccauuccugac

SEQ ID NO: 5367 - RNA, 23 nt, Artificial
  synthetic
uuggaugagaaggaaccauuccu

SEQ ID NO: 5368 - RNA, 23 nt, Artificial
  synthetic
aguuggaugagaaggaaccauuc

SEQ ID NO: 5369 - RNA, 23 nt, Artificial
  synthetic
caguuggaugagaaggaaccauu

SEQ ID NO: 5370 - RNA, 23 nt, Artificial
  synthetic
ggcaguuggaugagaaggaacca

SEQ ID NO: 5371 - RNA, 23 nt, Artificial
  synthetic
cauuagcaucauuggcgcauggg

SEQ ID NO: 5372 - RNA, 23 nt, Artificial
  synthetic
cgucauuagcaucauuggcgcau

SEQ ID NO: 5373 - RNA, 23 nt, Artificial
  synthetic
gucgucauuagcaucauuggcgc

SEQ ID NO: 5374 - RNA, 23 nt, Artificial
  synthetic
ugucgucauuagcaucauuggcg

SEQ ID NO: 5375 - RNA, 23 nt, Artificial
  synthetic
cugugucgucauuagcaucauug

SEQ ID NO: 5376 - RNA, 23 nt, Artificial
  synthetic
gcugugucgucauuagcaucauu

SEQ ID NO: 5377 - RNA, 23 nt, Artificial
  synthetic
ggcuguagugcacuuugagcgag

SEQ ID NO: 5378 - RNA, 23 nt, Artificial
  synthetic
uugucgagacuggaaugggcugu

SEQ ID NO: 5379 - RNA, 23 nt, Artificial
  synthetic
uguugucgagacuggaaugggcu

SEQ ID NO: 5380 - RNA, 23 nt, Artificial
  synthetic
uuacaacugcuguuggugguggg

SEQ ID NO: 5381 - RNA, 23 nt, Artificial
  synthetic
cuuacaacugcuguugguggugg

SEQ ID NO: 5382 - RNA, 23 nt, Artificial
  synthetic
ccuuacaacugcuguugguggug

SEQ ID NO: 5383 - RNA, 23 nt, Artificial
  synthetic
agccuuacaacugcuguuggugg

SEQ ID NO: 5384 - RNA, 23 nt, Artificial
  synthetic
gcagccuuacaacugcuguuggu

SEQ ID NO: 5385 - RNA, 23 nt, Artificial
  synthetic
aguugguagaagcaguagaaggg

SEQ ID NO: 5386 - RNA, 23 nt, Artificial
  synthetic
ccaguugguagaagcaguagaag

SEQ ID NO: 5387 - RNA, 23 nt, Artificial
  synthetic
uccaguugguagaagcaguagaa

SEQ ID NO: 5388 - RNA, 23 nt, Artificial
  synthetic
gcuuccaguugguagaagcagua

SEQ ID NO: 5389 - RNA, 23 nt, Artificial
  synthetic
aguuuucugugcuuccaguuggu

SEQ ID NO: 5390 - RNA, 23 nt, Artificial
  synthetic
uuggauguuacaagaaaucaaca

SEQ ID NO: 5391 - RNA, 23 nt, Artificial
  synthetic
cuauuggauguuacaagaaauca

SEQ ID NO: 5392 - RNA, 23 nt, Artificial
  synthetic
uccuauuggauguuacaagaaau

SEQ ID NO: 5393 - RNA, 23 nt, Artificial
  synthetic
uuccuauuggauguuacaagaaa

SEQ ID NO: 5394 - RNA, 23 nt, Artificial
  synthetic
gcauuccuauuggauguuacaag

SEQ ID NO: 5395 - RNA, 23 nt, Artificial
  synthetic
uagcauuccuauuggauguuaca

SEQ ID NO: 5396 - RNA, 23 nt, Artificial
  synthetic
uuagcauuccuauuggauguuac

SEQ ID NO: 5397 - RNA, 23 nt, Artificial
  synthetic
guuagcauuccuauuggauguua

SEQ ID NO: 5398 - RNA, 23 nt, Artificial
  synthetic
uguuagcauuccuauuggauguu

SEQ ID NO: 5399 - RNA, 23 nt, Artificial
  synthetic
ugaacuguuagcauuccuauugg

SEQ ID NO: 5400 - RNA, 23 nt, Artificial
  synthetic
gugaacuguuagcauuccuauug

SEQ ID NO: 5401 - RNA, 23 nt, Artificial
  synthetic
agugaacuguuagcauuccuauu

SEQ ID NO: 5402 - RNA, 23 nt, Artificial
  synthetic
aagugaacuguuagcauuccuau

SEQ ID NO: 5403 - RNA, 23 nt, Artificial
  synthetic
caagugaacuguuagcauuccua

SEQ ID NO: 5404 - RNA, 23 nt, Artificial
  synthetic
gcaagugaacuguuagcauuccu

SEQ ID NO: 5405 - RNA, 23 nt, Artificial
  synthetic
cacugcaagugaacuguuagcau

SEQ ID NO: 5406 - RNA, 23 nt, Artificial
  synthetic
ucuuccacugcaagugaacuguu

SEQ ID NO: 5407 - RNA, 23 nt, Artificial
  synthetic
ccuaaaugccucuacucggucca

SEQ ID NO: 5408 - RNA, 23 nt, Artificial
  synthetic
uccuaaaugccucuacucggucc

SEQ ID NO: 5409 - RNA, 23 nt, Artificial
  synthetic
auauggaauuauggaauagcccc

SEQ ID NO: 5410 - RNA, 23 nt, Artificial
  synthetic
aaauaacuuccaguuucggcaag

SEQ ID NO: 5411 - RNA, 23 nt, Artificial
  synthetic
auaaauaacuuccaguuucggca

SEQ ID NO: 5412 - RNA, 23 nt, Artificial
  synthetic
aauaaauaacuuccaguuucggc

SEQ ID NO: 5413 - RNA, 23 nt, Artificial
  synthetic
aaauaaauaacuuccaguuucgg

SEQ ID NO: 5414 - RNA, 23 nt, Artificial
  synthetic
aaaauaaauaacuuccaguuucg

SEQ ID NO: 5415 - RNA, 23 nt, Artificial
  synthetic
caugacuuucaaggguuauuaaa

SEQ ID NO: 5416 - RNA, 23 nt, Artificial
  synthetic
ucaugacuuucaaggguuauuaa

SEQ ID NO: 5417 - RNA, 23 nt, Artificial
  synthetic
uguucaugacuuucaaggguuau

SEQ ID NO: 5418 - RNA, 23 nt, Artificial
  synthetic
gauguguucaugacuuucaaggg

SEQ ID NO: 5419 - RNA, 23 nt, Artificial
  synthetic
cuagcugauguguucaugacuuu

SEQ ID NO: 5420 - RNA, 23 nt, Artificial
  synthetic
gcuagcugauguguucaugacuu

SEQ ID NO: 5421 - RNA, 23 nt, Artificial
  synthetic
ugcuagcugauguguucaugacu

SEQ ID NO: 5422 - RNA, 23 nt, Artificial
  synthetic
uugcuagcugauguguucaugac

SEQ ID NO: 5423 - RNA, 23 nt, Artificial
  synthetic
uugcuagcugauguguucaugac

SEQ ID NO: 5424 - RNA, 23 nt, Artificial
  synthetic
uuugcuagcugauguguucauga

SEQ ID NO: 5425 - RNA, 23 nt, Artificial
  synthetic
uuuugcuagcugauguguucaug

SEQ ID NO: 5426 - RNA, 23 nt, Artificial
  synthetic
cuuuugcuagcugauguguucau

SEQ ID NO: 5427 - RNA, 23 nt, Artificial
  synthetic
ucuuuugcuagcugauguguuca

SEQ ID NO: 5428 - RNA, 23 nt, Artificial
  synthetic
uacuucuuuugcuagcugaugug

SEQ ID NO: 5429 - RNA, 23 nt, Artificial
  synthetic
ucuuguuacuucuuuugcuagcu

SEQ ID NO: 5430 - RNA, 23 nt, Artificial
  synthetic
agcaagaaucacucuuguuacuu

SEQ ID NO: 5431 - RNA, 23 nt, Artificial
  synthetic
cagcaagaaucacucuuguuacu

SEQ ID NO: 5432 - RNA, 23 nt, Artificial
  synthetic
gcagcaagaaucacucuuguuac

SEQ ID NO: 5433 - RNA, 23 nt, Artificial
  synthetic
aauagcagcaagaaucacucuug

SEQ ID NO: 5434 - RNA, 23 nt, Artificial
  synthetic
uaauagcagcaagaaucacucuu

SEQ ID NO: 5435 - RNA, 23 nt, Artificial
  synthetic
aguaauagcagcaagaaucacuc

SEQ ID NO: 5436 - RNA, 23 nt, Artificial
  synthetic
uuuaguaaaagggcguuccaagu

SEQ ID NO: 5437 - RNA, 23 nt, Artificial
  synthetic
guuuaguaaaagggcguuccaag

SEQ ID NO: 5438 - RNA, 23 nt, Artificial
  synthetic
aaguuuaguaaaagggcguucca

SEQ ID NO: 5439 - RNA, 23 nt, Artificial
  synthetic
caaguuuaguaaaagggcguucc

SEQ ID NO: 5440 - RNA, 23 nt, Artificial
  synthetic
ucaaguuuaguaaaagggcguuc

SEQ ID NO: 5441 - RNA, 23 nt, Artificial
  synthetic
gucaaguuuaguaaaagggcguu

SEQ ID NO: 5442 - RNA, 23 nt, Artificial
  synthetic
acgguaagaauuuacugaaacuu

SEQ ID NO: 5443 - RNA, 23 nt, Artificial
  synthetic
gacgguaagaauuuacugaaacu

SEQ ID NO: 5444 - RNA, 23 nt, Artificial
  synthetic
ugacgguaagaauuuacugaaac

SEQ ID NO: 5445 - RNA, 23 nt, Artificial
  synthetic
uugacgguaagaauuuacugaaa

SEQ ID NO: 5446 - RNA, 23 nt, Artificial
  synthetic
uuugacgguaagaauuuacugaa

SEQ ID NO: 5447 - RNA, 23 nt, Artificial
  synthetic
guuugacgguaagaauuuacuga

SEQ ID NO: 5448 - RNA, 23 nt, Artificial
  synthetic
aguuugacgguaagaauuuacug

SEQ ID NO: 5449 - RNA, 23 nt, Artificial
  synthetic
caguuugacgguaagaauuuacu

SEQ ID NO: 5450 - RNA, 23 nt, Artificial
  synthetic
ucaguuugacgguaagaauuuac

SEQ ID NO: 5451 - RNA, 23 nt, Artificial
  synthetic
gucaguuugacgguaagaauuua

SEQ ID NO: 5452 - RNA, 23 nt, Artificial
  synthetic
cgucaguuugacgguaagaauuu

SEQ ID NO: 5453 - RNA, 23 nt, Artificial
  synthetic
ccgucaguuugacgguaagaauu

SEQ ID NO: 5454 - RNA, 23 nt, Artificial
  synthetic
uccgucaguuugacgguaagaau

SEQ ID NO: 5455 - RNA, 23 nt, Artificial
  synthetic
auccgucaguuugacgguaagaa

SEQ ID NO: 5456 - RNA, 23 nt, Artificial
  synthetic
aauccgucaguuugacgguaaga

SEQ ID NO: 5457 - RNA, 23 nt, Artificial
  synthetic
uaauccgucaguuugacgguaag

SEQ ID NO: 5458 - RNA, 23 nt, Artificial
  synthetic
uaauccgucaguuugacgguaag

SEQ ID NO: 5459 - RNA, 23 nt, Artificial
  synthetic
auaauccgucaguuugacgguaa

SEQ ID NO: 5460 - RNA, 23 nt, Artificial
  synthetic
auaaauaauaauccgucaguuug

SEQ ID NO: 5461 - RNA, 23 nt, Artificial
  synthetic
cagugaucaccucaucaaacuug

SEQ ID NO: 5462 - RNA, 23 nt, Artificial
  synthetic
aguugaaccacuguagacaguga

SEQ ID NO: 5463 - RNA, 23 nt, Artificial
  synthetic
aaguugaaccacuguagacagug

SEQ ID NO: 5464 - RNA, 23 nt, Artificial
  synthetic
uuaaaaguugaaccacuguagac

SEQ ID NO: 5465 - RNA, 23 nt, Artificial
  synthetic
cuuaaaaguugaaccacuguaga

SEQ ID NO: 5466 - RNA, 23 nt, Artificial
  synthetic
uucccuuaacuuaaaaguugaac

SEQ ID NO: 5467 - RNA, 23 nt, Artificial
  synthetic
uuuucccuuaacuuaaaaguuga

SEQ ID NO: 5468 - RNA, 23 nt, Artificial
  synthetic
aucuacaaaguaaaaguuuuucc

SEQ ID NO: 5469 - RNA, 23 nt, Artificial
  synthetic
caaaagaaaucguagacugaggc

SEQ ID NO: 5470 - RNA, 23 nt, Artificial
  synthetic
ucaaaagaaaucguagacugagg

SEQ ID NO: 5471 - RNA, 23 nt, Artificial
  synthetic
aucaaaagaaaucguagacugag

SEQ ID NO: 5472 - RNA, 23 nt, Artificial
  synthetic
ggauucuguacuuuucucaugug

SEQ ID NO: 5473 - RNA, 23 nt, Artificial
  synthetic
ggauucuguacuuuucucaugug

SEQ ID NO: 5474 - RNA, 23 nt, Artificial
  synthetic
cacaacaaagucugaacauuuga

SEQ ID NO: 5475 - RNA, 23 nt, Artificial
  synthetic
uucacuuuagcacugauagcaga

SEQ ID NO: 5476 - RNA, 23 nt, Artificial
  synthetic
aagauaaacugcuaucauacgua

SEQ ID NO: 5477 - RNA, 23 nt, Artificial
  synthetic
gaagauaaacugcuaucauacgu

SEQ ID NO: 5478 - RNA, 23 nt, Artificial
  synthetic
uaaaaauucuucugaguuaucuc

SEQ ID NO: 5479 - RNA, 23 nt, Artificial
  synthetic
ucugaagugugagaaguggaucu

SEQ ID NO: 5480 - RNA, 23 nt, Artificial
  synthetic
guugaaaucugaagugugagaag

SEQ ID NO: 5481 - RNA, 23 nt, Artificial
  synthetic
augcguuuaggcauaguagagac

SEQ ID NO: 5482 - RNA, 23 nt, Artificial
  synthetic
caugcguuuaggcauaguagaga

SEQ ID NO: 5483 - RNA, 23 nt, Artificial
  synthetic
gcagaaacucugugauuucgagg

SEQ ID NO: 5484 - RNA, 23 nt, Artificial
  synthetic
agcagaaacucugugauuucgag

SEQ ID NO: 5485 - RNA, 23 nt, Artificial
  synthetic
ccauagauucagaaguagaacuu

SEQ ID NO: 5486 - RNA, 23 nt, Artificial
  synthetic
uccauagauucagaaguagaacu

SEQ ID NO: 5487 - RNA, 23 nt, Artificial
  synthetic
auccauagauucagaaguagaac

SEQ ID NO: 5488 - RNA, 23 nt, Artificial
  synthetic
gauccauagauucagaaguagaa

SEQ ID NO: 5489 - RNA, 23 nt, Artificial
  synthetic
aguaguugauccauagauucaga

SEQ ID NO: 5490 - RNA, 23 nt, Artificial
  synthetic
aguaguugauccauagauucaga

SEQ ID NO: 5491 - RNA, 23 nt, Artificial
  synthetic
ucucuauuuuuguuuaguaguug

SEQ ID NO: 5492 - RNA, 23 nt, Artificial
  synthetic
aaagaauccuuagcacuugguuc

SEQ ID NO: 5493 - RNA, 23 nt, Artificial
  synthetic
gauucaauguugauuuccuaacu

SEQ ID NO: 5494 - RNA, 23 nt, Artificial
  synthetic
gaguauaaacuggaguuggcugu

SEQ ID NO: 5495 - RNA, 23 nt, Artificial
  synthetic
ccguacugaguugcugaagaaga

SEQ ID NO: 5496 - RNA, 23 nt, Artificial
  synthetic
guggaaauggcaaaguagaaaga

SEQ ID NO: 5497 - RNA, 23 nt, Artificial
  synthetic
cguggaaauggcaaaguagaaag

SEQ ID NO: 5498 - RNA, 23 nt, Artificial
  synthetic
uuccuauuggauguuacaagaaa

SEQ ID NO: 5499 - RNA, 23 nt, Artificial
  synthetic
auaaauaacuuccaguuucggca

SEQ ID NO: 5500 - RNA, 23 nt, Artificial
  synthetic
auaaauaacuuccaguuucggca

SEQ ID NO: 5501 - RNA, 23 nt, Artificial
  synthetic
auaaauaacuuccaguuucggca

SEQ ID NO: 5502 - RNA, 23 nt, Artificial
  synthetic
aaaauaaauaacuuccaguuucg

SEQ ID NO: 5503 - RNA, 23 nt, Artificial
  synthetic
gauguguucaugacuuucaaggg

SEQ ID NO: 5504 - RNA, 23 nt, Artificial
  synthetic
gauguguucaugacuuucaaggg

SEQ ID NO: 5505 - RNA, 23 nt, Artificial
  synthetic
cuagcugauguguucaugacuuu

SEQ ID NO: 5506 - RNA, 23 nt, Artificial
  synthetic
cuagcugauguguucaugacuuu

SEQ ID NO: 5507 - RNA, 23 nt, Artificial
  synthetic
cuagcugauguguucaugacuuu

SEQ ID NO: 5508 - RNA, 23 nt, Artificial
  synthetic
gcuagcugauguguucaugacuu

SEQ ID NO: 5509 - RNA, 23 nt, Artificial
  synthetic
gcuagcugauguguucaugacuu

SEQ ID NO: 5510 - RNA, 23 nt, Artificial
  synthetic
uugcuagcugauguguucaugac

SEQ ID NO: 5511 - RNA, 23 nt, Artificial
  synthetic
aauagcagcaagaaucacucuug

SEQ ID NO: 5512 - RNA, 23 nt, Artificial
  synthetic
aauagcagcaagaaucacucuug

SEQ ID NO: 5513 - RNA, 23 nt, Artificial
  synthetic
aguaauagcagcaagaaucacuc

SEQ ID NO: 5514 - RNA, 23 nt, Artificial
  synthetic
aguaauagcagcaagaaucacuc

SEQ ID NO: 5515 - RNA, 23 nt, Artificial
  synthetic
gucaaguuuaguaaaagggcguu

SEQ ID NO: 5516 - RNA, 23 nt, Artificial
  synthetic
gucaaguuuaguaaaagggcguu

SEQ ID NO: 5517 - RNA, 23 nt, Artificial
  synthetic
uaauccgucaguuugacgguaag

SEQ ID NO: 5518 - RNA, 23 nt, Artificial
  synthetic
aguugaaccacuguagacaguga

SEQ ID NO: 5519 - RNA, 23 nt, Artificial
  synthetic
aguugaaccacuguagacaguga

SEQ ID NO: 5520 - RNA, 23 nt, Artificial
  synthetic
uaacuuaaaaguugaaccacugu

SEQ ID NO: 5521 - RNA, 23 nt, Artificial
  synthetic
uuaacuuaaaaguugaaccacug

SEQ ID NO: 5522 - RNA, 23 nt, Artificial
  synthetic
aaaguaaaaguuuuucccuuaac

SEQ ID NO: 5523 - RNA, 23 nt, Artificial
  synthetic
aaaagaaaucguaggcugaggca

SEQ ID NO: 5524 - RNA, 23 nt, Artificial
  synthetic
caaaagaaaucguaggcugaggc

SEQ ID NO: 5525 - RNA, 23 nt, Artificial
  synthetic
ucaaaagaaaucguaggcugagg

SEQ ID NO: 5526 - RNA, 23 nt, Artificial
  synthetic
guaaguauaugaaccauccucac

SEQ ID NO: 5527 - RNA, 23 nt, Artificial
  synthetic
auaaguauaugaaccauccucac

SEQ ID NO: 5528 - RNA, 23 nt, Artificial
  synthetic
cguaaguauaugaaccauccuca

SEQ ID NO: 5529 - RNA, 23 nt, Artificial
  synthetic
uuuucacuuguacuucacauuuc

SEQ ID NO: 5530 - RNA, 23 nt, Artificial
  synthetic
uuuucacuuguacuucacauuuc

SEQ ID NO: 5531 - RNA, 23 nt, Artificial
  synthetic
cguuuuucacuuguacuucacau

SEQ ID NO: 5532 - RNA, 23 nt, Artificial
  synthetic
uguauguuuuaaaaacuccuuca

SEQ ID NO: 5533 - RNA, 23 nt, Artificial
  synthetic
cuguauguuuuaaaaacuccuuc

SEQ ID NO: 5534 - RNA, 23 nt, Artificial
  synthetic
cacacuuaggacuguauguuuua

SEQ ID NO: 5535 - RNA, 23 nt, Artificial
  synthetic
ucacacuuaggacuguauguuuu

SEQ ID NO: 5536 - RNA, 23 nt, Artificial
  synthetic
gucacacuuaggacuguauguuu

SEQ ID NO: 5537 - RNA, 23 nt, Artificial
  synthetic
uguacuuuucucaugugcagcau

SEQ ID NO: 5538 - RNA, 23 nt, Artificial
  synthetic
cuguacuuuucucaugugcagca

SEQ ID NO: 5539 - RNA, 23 nt, Artificial
  synthetic
uuugaacaaaacacucuccauua

SEQ ID NO: 5540 - RNA, 23 nt, Artificial
  synthetic
cauuugaacaaaacacucuccau

SEQ ID NO: 5541 - RNA, 23 nt, Artificial
  synthetic
aagucugagcauuugaacaaaac

SEQ ID NO: 5542 - RNA, 23 nt, Artificial
  synthetic
cgaagucugagcauuugaacaaa

SEQ ID NO: 5543 - RNA, 23 nt, Artificial
  synthetic
acgaagucugagcauuugaacaa

SEQ ID NO: 5544 - RNA, 23 nt, Artificial
  synthetic
aacgaagucugagcauuugaaca

SEQ ID NO: 5545 - RNA, 23 nt, Artificial
  synthetic
caacgaagucugagcauuugaac

SEQ ID NO: 5546 - RNA, 23 nt, Artificial
  synthetic
acaacgaagucugagcauuugaa

SEQ ID NO: 5547 - RNA, 23 nt, Artificial
  synthetic
cacaacgaagucugagcauuuga

SEQ ID NO: 5548 - RNA, 23 nt, Artificial
  synthetic
ccacaacgaagucugagcauuug

SEQ ID NO: 5549 - RNA, 23 nt, Artificial
  synthetic
cuucauuauaucgaaacauguca

SEQ ID NO: 5550 - RNA, 23 nt, Artificial
  synthetic
ggaaccguauaugaagauaaacu

SEQ ID NO: 5551 - RNA, 23 nt, Artificial
  synthetic
aaauucuucugaguugucccuuu

SEQ ID NO: 5552 - RNA, 23 nt, Artificial
  synthetic
gaaauucuucugaguugucccuu

SEQ ID NO: 5553 - RNA, 23 nt, Artificial
  synthetic
agaaauucuucugaguugucccu

SEQ ID NO: 5554 - RNA, 23 nt, Artificial
  synthetic
aagaaauucuucugaguuguccc

SEQ ID NO: 5555 - RNA, 23 nt, Artificial
  synthetic
aaaucugaagugugagaagcagc

SEQ ID NO: 5556 - RNA, 23 nt, Artificial
  synthetic
gaaaucugaagugugagaagcag

SEQ ID NO: 5557 - RNA, 23 nt, Artificial
  synthetic
ugaaaucugaagugugagaagca

SEQ ID NO: 5558 - RNA, 23 nt, Artificial
  synthetic
ugaaaucugaagugugagaagca

SEQ ID NO: 5559 - RNA, 23 nt, Artificial
  synthetic
uugaaaucugaagugugagaagc

SEQ ID NO: 5560 - DNA, 23 bp, Artificial
  synthetic
uugaaatcugaagugugagaagc

SEQ ID NO: 5561 - RNA, 23 nt, Artificial
  synthetic
auuaacuacucuuuggucugagc

SEQ ID NO: 5562 - DNA, 23 bp, Artificial
  synthetic
auuaactacucuuuggucugagc

SEQ ID NO: 5563 - RNA, 23 nt, Artificial
  synthetic
cauuaacuacucuuuggucugag

SEQ ID NO: 5564 - RNA, 23 nt, Artificial
  synthetic
aauuaacuacucuuuggucugag

SEQ ID NO: 5565 - RNA, 23 nt, Artificial
  synthetic
gauugugggauacaaauucuagg

SEQ ID NO: 5566 - RNA, 23 nt, Artificial
  synthetic
ggauugugggauacaaauucuag

SEQ ID NO: 5567 - RNA, 23 nt, Artificial
  synthetic
gggauugugggauacaaauucua

SEQ ID NO: 5568 - RNA, 23 nt, Artificial
  synthetic
aaaagcuaggugauguuucacuu

SEQ ID NO: 5569 - RNA, 23 nt, Artificial
  synthetic
gaaaagcuaggugauguuucacu

SEQ ID NO: 5570 - RNA, 23 nt, Artificial
  synthetic
ugaaaagcuaggugauguuucac

SEQ ID NO: 5571 - RNA, 23 nt, Artificial
  synthetic
uugaaaagcuaggugauguuuca

SEQ ID NO: 5572 - RNA, 23 nt, Artificial
  synthetic
uuugaaaagcuaggugauguuuc

SEQ ID NO: 5573 - RNA, 23 nt, Artificial
  synthetic
uuuugaaaagcuaggugauguuu

SEQ ID NO: 5574 - RNA, 23 nt, Artificial
  synthetic
cuuuugaaaagcuaggugauguu

SEQ ID NO: 5575 - RNA, 23 nt, Artificial
  synthetic
gcuuuugaaaagcuaggugaugu

SEQ ID NO: 5576 - RNA, 23 nt, Artificial
  synthetic
agcuuuugaaaagcuaggugaug

SEQ ID NO: 5577 - RNA, 23 nt, Artificial
  synthetic
cagcuuuugaaaagcuaggugau

SEQ ID NO: 5578 - RNA, 23 nt, Artificial
  synthetic
ucagcuuuugaaaagcuagguga

SEQ ID NO: 5579 - RNA, 23 nt, Artificial
  synthetic
gucagcuuuugaaaagcuaggug

SEQ ID NO: 5580 - RNA, 23 nt, Artificial
  synthetic
guugauccauagauucagaugua

SEQ ID NO: 5581 - RNA, 23 nt, Artificial
  synthetic
aguugauccauagauucagaugu

SEQ ID NO: 5582 - RNA, 23 nt, Artificial
  synthetic
uaguugauccauagauucagaug

SEQ ID NO: 5583 - RNA, 23 nt, Artificial
  synthetic
uaguugauccauagauucagaug

SEQ ID NO: 5584 - RNA, 23 nt, Artificial
  synthetic
guaguugauccauagauucagau

SEQ ID NO: 5585 - RNA, 23 nt, Artificial
  synthetic
auaguugauccauagauucagau

SEQ ID NO: 5586 - RNA, 23 nt, Artificial
  synthetic
cuuaguaguugauccauagauuc

SEQ ID NO: 5587 - RNA, 23 nt, Artificial
  synthetic
gcuuaguaguugauccauagauu

SEQ ID NO: 5588 - RNA, 23 nt, Artificial
  synthetic
ugcuuaguaguugauccauagau

SEQ ID NO: 5589 - RNA, 23 nt, Artificial
  synthetic
uugcuuaguaguugauccauaga

SEQ ID NO: 5590 - RNA, 23 nt, Artificial
  synthetic
uuugcuuaguaguugauccauag

SEQ ID NO: 5591 - RNA, 23 nt, Artificial
  synthetic
uuuugcuuaguaguugauccaua

SEQ ID NO: 5592 - RNA, 23 nt, Artificial
  synthetic
uuuuugcuuaguaguugauccau

SEQ ID NO: 5593 - RNA, 23 nt, Artificial
  synthetic
auuuuugcuuaguaguugaucca

SEQ ID NO: 5594 - RNA, 23 nt, Artificial
  synthetic
aaucucgugacuuuucuccuucu

SEQ ID NO: 5595 - RNA, 23 nt, Artificial
  synthetic
aaagaacgaggguugaacuccuu

SEQ ID NO: 5596 - RNA, 23 nt, Artificial
  synthetic
gagaaagaacgaggguugaacuc

SEQ ID NO: 5597 - RNA, 23 nt, Artificial
  synthetic
agagaaagaacgaggguugaacu

SEQ ID NO: 5598 - RNA, 23 nt, Artificial
  synthetic
gagagaaagaacgaggguugaac

SEQ ID NO: 5599 - RNA, 23 nt, Artificial
  synthetic
ugagagaaagaacgaggguugaa

SEQ ID NO: 5600 - RNA, 23 nt, Artificial
  synthetic
cugagagaaagaacgaggguuga

SEQ ID NO: 5601 - RNA, 23 nt, Artificial
  synthetic
cuuuggcugagagaaagaacgag

SEQ ID NO: 5602 - RNA, 23 nt, Artificial
  synthetic
gcuuuggcugagagaaagaacga

SEQ ID NO: 5603 - RNA, 23 nt, Artificial
  synthetic
auuaccuuguaugacaggacugu

SEQ ID NO: 5604 - RNA, 23 nt, Artificial
  synthetic
cauuaccuuguaugacaggacug

SEQ ID NO: 5605 - RNA, 23 nt, Artificial
  synthetic
cuggcauuaccuuguaugacagg

SEQ ID NO: 5606 - RNA, 23 nt, Artificial
  synthetic
ccuggcauuaccuuguaugacag

SEQ ID NO: 5607 - RNA, 23 nt, Artificial
  synthetic
cgguggaaauggcaaaguagaaa

SEQ ID NO: 5608 - RNA, 23 nt, Artificial
  synthetic
aaguucuaguuuucugugcuucc

SEQ ID NO: 5609 - RNA, 23 nt, Artificial
  synthetic
ugaaguucuaguuuucugugcuu

SEQ ID NO: 5610 - RNA, 23 nt, Artificial
  synthetic
aaugaaguucuaguuuucugugc

SEQ ID NO: 5611 - RNA, 23 nt, Artificial
  synthetic
caaugaaguucuaguuuucugug

SEQ ID NO: 5612 - RNA, 23 nt, Artificial
  synthetic
aacuuccaguuucagcaagcaga

SEQ ID NO: 5613 - RNA, 23 nt, Artificial
  synthetic
auaaauaacuuccaguuucagca

SEQ ID NO: 5614 - RNA, 23 nt, Artificial
  synthetic
aauaaauaacuuccaguuucagc

SEQ ID NO: 5615 - RNA, 23 nt, Artificial
  synthetic
aaauaaauaacuuccaguuucag

SEQ ID NO: 5616 - RNA, 23 nt, Artificial
  synthetic
aaauaaauaacuuccaguuucag

SEQ ID NO: 5617 - RNA, 23 nt, Artificial
  synthetic
ugauguguucaugacucucaagg

SEQ ID NO: 5618 - RNA, 23 nt, Artificial
  synthetic
cuagcugauguguucaugacucu

SEQ ID NO: 5619 - RNA, 23 nt, Artificial
  synthetic
auagcugauguguucaugacucu

SEQ ID NO: 5620 - RNA, 23 nt, Artificial
  synthetic
gcuagcugauguguucaugacuc

SEQ ID NO: 5621 - DNA, 23 bp, Artificial
  synthetic
acuagctgauguguucaugacuc

SEQ ID NO: 5622 - RNA, 23 nt, Artificial
  synthetic
guugcuagcugauguguucauga

SEQ ID NO: 5623 - RNA, 23 nt, Artificial
  synthetic
uguugcuagcugauguguucaug

SEQ ID NO: 5624 - RNA, 23 nt, Artificial
  synthetic
uuacuucuguugcuagcugaugu

SEQ ID NO: 5625 - RNA, 23 nt, Artificial
  synthetic
uguuacuucuguugcuagcugau

SEQ ID NO: 5626 - RNA, 23 nt, Artificial
  synthetic
ucuuguuacuucuguugcuagcu

SEQ ID NO: 5627 - RNA, 23 nt, Artificial
  synthetic
cucuuguuacuucuguugcuagc

SEQ ID NO: 5628 - RNA, 23 nt, Artificial
  synthetic
agaaucacucuuguuacuucugu

SEQ ID NO: 5629 - RNA, 23 nt, Artificial
  synthetic
agaaucacucuuguuacuucugu

SEQ ID NO: 5630 - RNA, 23 nt, Artificial
  synthetic
uaaagcgguaauagcagcaagaa

SEQ ID NO: 5631 - RNA, 23 nt, Artificial
  synthetic
uuuuaaagcgguaauagcagcaa

SEQ ID NO: 5632 - RNA, 23 nt, Artificial
  synthetic
cugucaaguuuaguaaaagggcg

SEQ ID NO: 5633 - RNA, 23 nt, Artificial
  synthetic
uucugucaaguuuaguaaaaggg

SEQ ID NO: 5634 - RNA, 23 nt, Artificial
  synthetic
cuucugucaaguuuaguaaaagg

SEQ ID NO: 5635 - RNA, 23 nt, Artificial
  synthetic
gaacuucugucaaguuuaguaaa

SEQ ID NO: 5636 - RNA, 23 nt, Artificial
  synthetic
cugaacuucugucaaguuuagua

SEQ ID NO: 5637 - RNA, 23 nt, Artificial
  synthetic
uuuacugaacuucugucaaguuu

SEQ ID NO: 5638 - RNA, 23 nt, Artificial
  synthetic
gaauuuacugaacuucugucaag

SEQ ID NO: 5639 - RNA, 23 nt, Artificial
  synthetic
aagaauuuacugaacuucuguca

SEQ ID NO: 5640 - RNA, 23 nt, Artificial
  synthetic
uaagaauuuacugaacuucuguc

SEQ ID NO: 5641 - RNA, 23 nt, Artificial
  synthetic
guaagaauuuacugaacuucugu

SEQ ID NO: 5642 - RNA, 23 nt, Artificial
  synthetic
aauaauaauccgucaguuuggcg

SEQ ID NO: 5643 - RNA, 23 nt, Artificial
  synthetic
aaguaaaaguuuucccuuaacuu

SEQ ID NO: 5644 - RNA, 23 nt, Artificial
  synthetic
aaaguaaaaguuuucccuuaacu

SEQ ID NO: 5645 - RNA, 23 nt, Artificial
  synthetic
caaaguaaaaguuuucccuuaac

SEQ ID NO: 5646 - RNA, 23 nt, Artificial
  synthetic
uacaaaguaaaaguuuucccuua

SEQ ID NO: 5647 - RNA, 23 nt, Artificial
  synthetic
cuacaaaguaaaaguuuucccuu

SEQ ID NO: 5648 - RNA, 23 nt, Artificial
  synthetic
aucuacaaaguaaaaguuuuccc

SEQ ID NO: 5649 - RNA, 23 nt, Artificial
  synthetic
uaucuacaaaguaaaaguuuucc

SEQ ID NO: 5650 - RNA, 23 nt, Artificial
  synthetic
uaucuacaaaguaaaaguuuucc

SEQ ID NO: 5651 - RNA, 21 nt, Artificial
  synthetic
uccgacuuccgguaaagagua

SEQ ID NO: 5652 - RNA, 21 nt, Artificial
  synthetic
ccgacuuccgguaaagaguca

SEQ ID NO: 5653 - RNA, 21 nt, Artificial
  synthetic
cgacuuccgguaaagagucca

SEQ ID NO: 5654 - RNA, 21 nt, Artificial
  synthetic
aaugugaaguacaagugaaaa

SEQ ID NO: 5655 - RNA, 21 nt, Artificial
  synthetic
augugaaguacaagugaaaaa

SEQ ID NO: 5656 - RNA, 21 nt, Artificial
  synthetic
gugaaguacaagugaaaaaua

SEQ ID NO: 5657 - RNA, 21 nt, Artificial
  synthetic
caugagaaaaguacagaauca

SEQ ID NO: 5658 - RNA, 21 nt, Artificial
  synthetic
cacuucucacacuucagauua

SEQ ID NO: 5659 - RNA, 21 nt, Artificial
  synthetic
acuucucacacuucagauuua

SEQ ID NO: 5660 - RNA, 21 nt, Artificial
  synthetic
cuucucacacuucagauuuca

SEQ ID NO: 5661 - RNA, 21 nt, Artificial
  synthetic
uucucacacuucagauuucaa

SEQ ID NO: 5662 - RNA, 21 nt, Artificial
  synthetic
ucucacacuucagauuucaaa

SEQ ID NO: 5663 - RNA, 21 nt, Artificial
  synthetic
cucacacuucagauuucaaca

SEQ ID NO: 5664 - RNA, 21 nt, Artificial
  synthetic
ucacacuucagauuucaacca

SEQ ID NO: 5665 - RNA, 21 nt, Artificial
  synthetic
cacacuucagauuucaaccca

SEQ ID NO: 5666 - RNA, 21 nt, Artificial
  synthetic
acuucagauuucaacccgaaa

SEQ ID NO: 5667 - RNA, 21 nt, Artificial
  synthetic
ucagaccaaagaguaguuaaa

SEQ ID NO: 5668 - RNA, 21 nt, Artificial
  synthetic
cagaccaaagaguaguuaaua

SEQ ID NO: 5669 - RNA, 21 nt, Artificial
  synthetic
cucuacuaugccuaaacgcaa

SEQ ID NO: 5670 - RNA, 21 nt, Artificial
  synthetic
ucuacuaugccuaaacgcaua

SEQ ID NO: 5671 - RNA, 21 nt, Artificial
  synthetic
uacuaugccuaaacgcaugua

SEQ ID NO: 5672 - RNA, 21 nt, Artificial
  synthetic
cuucugaaucuauggaucaaa

SEQ ID NO: 5673 - RNA, 21 nt, Artificial
  synthetic
uucugaaucuauggaucaaca

SEQ ID NO: 5674 - RNA, 21 nt, Artificial
  synthetic
ucugaaucuauggaucaacua

SEQ ID NO: 5675 - RNA, 21 nt, Artificial
  synthetic
cugaaucuauggaucaacuaa

SEQ ID NO: 5676 - RNA, 21 nt, Artificial
  synthetic
ugaaucuauggaucaacuaca

SEQ ID NO: 5677 - RNA, 21 nt, Artificial
  synthetic
gaaucuauggaucaacuacua

SEQ ID NO: 5678 - RNA, 21 nt, Artificial
  synthetic
aaucuauggaucaacuacuaa

SEQ ID NO: 5679 - RNA, 21 nt, Artificial
  synthetic
aucuauggaucaacuacuaaa

SEQ ID NO: 5680 - RNA, 21 nt, Artificial
  synthetic
uauacccaauaccuaugacga

SEQ ID NO: 5681 - RNA, 21 nt, Artificial
  synthetic
gacauauagagcaguaccaaa

SEQ ID NO: 5682 - RNA, 21 nt, Artificial
  synthetic
auauagagcaguaccaaauaa

SEQ ID NO: 5683 - RNA, 21 nt, Artificial
  synthetic
uauagagcaguaccaaauaua

SEQ ID NO: 5684 - RNA, 21 nt, Artificial
  synthetic
auagagcaguaccaaauauga

SEQ ID NO: 5685 - RNA, 21 nt, Artificial
  synthetic
agagcaguaccaaauaugcca

SEQ ID NO: 5686 - RNA, 21 nt, Artificial
  synthetic
ugucccaaauuaccauacaaa

SEQ ID NO: 5687 - RNA, 21 nt, Artificial
  synthetic
ucccaaauuaccauacaacaa

SEQ ID NO: 5688 - RNA, 21 nt, Artificial
  synthetic
aagcccuucuuucuacuuuga

SEQ ID NO: 5689 - RNA, 21 nt, Artificial
  synthetic
cccuucuuucuacuuugccaa

SEQ ID NO: 5690 - RNA, 21 nt, Artificial
  synthetic
ccuucuuucuacuuugccaua

SEQ ID NO: 5691 - RNA, 21 nt, Artificial
  synthetic
cuucuuucuacuuugccauua

SEQ ID NO: 5692 - RNA, 21 nt, Artificial
  synthetic
uucuuucuacuuugccauuua

SEQ ID NO: 5693 - RNA, 21 nt, Artificial
  synthetic
ucuuucuacuuugccauuuca

SEQ ID NO: 5694 - RNA, 21 nt, Artificial
  synthetic
cuuucuacuuugccauuucca

SEQ ID NO: 5695 - RNA, 21 nt, Artificial
  synthetic
uuucuacuuugccauuuccaa

SEQ ID NO: 5696 - RNA, 21 nt, Artificial
  synthetic
uucuacuuugccauuuccaca

SEQ ID NO: 5697 - RNA, 21 nt, Artificial
  synthetic
cauguacagucaggaauggua

SEQ ID NO: 5698 - RNA, 21 nt, Artificial
  synthetic
auguacagucaggaaugguua

SEQ ID NO: 5699 - RNA, 21 nt, Artificial
  synthetic
uguacagucaggaaugguuca

SEQ ID NO: 5700 - RNA, 21 nt, Artificial
  synthetic
caggaaugguuccuucucaua

SEQ ID NO: 5701 - RNA, 21 nt, Artificial
  synthetic
gaaugguuccuucucauccaa

SEQ ID NO: 5702 - RNA, 21 nt, Artificial
  synthetic
augguuccuucucauccaaca

SEQ ID NO: 5703 - RNA, 21 nt, Artificial
  synthetic
ugguuccuucucauccaacua

SEQ ID NO: 5704 - RNA, 21 nt, Artificial
  synthetic
guuccuucucauccaacugca

SEQ ID NO: 5705 - RNA, 21 nt, Artificial
  synthetic
caugcgccaaugaugcuaaua

SEQ ID NO: 5706 - RNA, 21 nt, Artificial
  synthetic
gcgccaaugaugcuaaugaca

SEQ ID NO: 5707 - RNA, 21 nt, Artificial
  synthetic
gccaaugaugcuaaugacgaa

SEQ ID NO: 5708 - RNA, 21 nt, Artificial
  synthetic
ccaaugaugcuaaugacgaca

SEQ ID NO: 5709 - RNA, 21 nt, Artificial
  synthetic
augaugcuaaugacgacacaa

SEQ ID NO: 5710 - RNA, 21 nt, Artificial
  synthetic
ugaugcuaaugacgacacaga

SEQ ID NO: 5711 - RNA, 21 nt, Artificial
  synthetic
cgcucaaagugcacuacagca

SEQ ID NO: 5712 - RNA, 21 nt, Artificial
  synthetic
agcccauuccagucucgacaa

SEQ ID NO: 5713 - RNA, 21 nt, Artificial
  synthetic
cccauuccagucucgacaaca

SEQ ID NO: 5714 - RNA, 21 nt, Artificial
  synthetic
caccaccaacagcaguuguaa

SEQ ID NO: 5715 - RNA, 21 nt, Artificial
  synthetic
accaccaacagcaguuguaaa

SEQ ID NO: 5716 - RNA, 21 nt, Artificial
  synthetic
ccaccaacagcaguuguaaga

SEQ ID NO: 5717 - RNA, 21 nt, Artificial
  synthetic
accaacagcaguuguaaggca

SEQ ID NO: 5718 - RNA, 21 nt, Artificial
  synthetic
caacagcaguuguaaggcuga

SEQ ID NO: 5719 - RNA, 21 nt, Artificial
  synthetic
cuucuacugcuucuaccaaca

SEQ ID NO: 5720 - RNA, 21 nt, Artificial
  synthetic
ucuacugcuucuaccaacuga

SEQ ID NO: 5721 - RNA, 21 nt, Artificial
  synthetic
cuacugcuucuaccaacugga

SEQ ID NO: 5722 - RNA, 21 nt, Artificial
  synthetic
cugcuucuaccaacuggaaga

SEQ ID NO: 5723 - RNA, 21 nt, Artificial
  synthetic
caacuggaagcacagaaaaca

SEQ ID NO: 5724 - RNA, 21 nt, Artificial
  synthetic
uugauuucuuguaacauccaa

SEQ ID NO: 5725 - RNA, 21 nt, Artificial
  synthetic
auuucuuguaacauccaauaa

SEQ ID NO: 5726 - RNA, 21 nt, Artificial
  synthetic
uucuuguaacauccaauagga

SEQ ID NO: 5727 - RNA, 21 nt, Artificial
  synthetic
ucuuguaacauccaauaggaa

SEQ ID NO: 5728 - RNA, 21 nt, Artificial
  synthetic
uguaacauccaauaggaauga

SEQ ID NO: 5729 - RNA, 21 nt, Artificial
  synthetic
uaacauccaauaggaaugcua

SEQ ID NO: 5730 - RNA, 21 nt, Artificial
  synthetic
aacauccaauaggaaugcuaa

SEQ ID NO: 5731 - RNA, 21 nt, Artificial
  synthetic
acauccaauaggaaugcuaaa

SEQ ID NO: 5732 - RNA, 21 nt, Artificial
  synthetic
cauccaauaggaaugcuaaca

SEQ ID NO: 5733 - RNA, 21 nt, Artificial
  synthetic
aauaggaaugcuaacaguuca

SEQ ID NO: 5734 - RNA, 21 nt, Artificial
  synthetic
auaggaaugcuaacaguucaa

SEQ ID NO: 5735 - RNA, 21 nt, Artificial
  synthetic
uaggaaugcuaacaguucaca

SEQ ID NO: 5736 - RNA, 21 nt, Artificial
  synthetic
aggaaugcuaacaguucacua

SEQ ID NO: 5737 - RNA, 21 nt, Artificial
  synthetic
ggaaugcuaacaguucacuua

SEQ ID NO: 5738 - RNA, 21 nt, Artificial
  synthetic
gaaugcuaacaguucacuuga

SEQ ID NO: 5739 - RNA, 21 nt, Artificial
  synthetic
gcuaacaguucacuugcagua

SEQ ID NO: 5740 - RNA, 21 nt, Artificial
  synthetic
caguucacuugcaguggaaga

SEQ ID NO: 5741 - RNA, 21 nt, Artificial
  synthetic
gaccgaguagaggcauuuaga

SEQ ID NO: 5742 - RNA, 21 nt, Artificial
  synthetic
accgaguagaggcauuuagga

SEQ ID NO: 5743 - RNA, 21 nt, Artificial
  synthetic
ggcuauuccauaauuccauaa

SEQ ID NO: 5744 - RNA, 21 nt, Artificial
  synthetic
ugccgaaacuggaaguuauua

SEQ ID NO: 5745 - RNA, 21 nt, Artificial
  synthetic
ccgaaacuggaaguuauuuaa

SEQ ID NO: 5746 - RNA, 21 nt, Artificial
  synthetic
cgaaacuggaaguuauuuaua

SEQ ID NO: 5747 - RNA, 21 nt, Artificial
  synthetic
gaaacuggaaguuauuuauua

SEQ ID NO: 5748 - RNA, 21 nt, Artificial
  synthetic
aaacuggaaguuauuuauuua

SEQ ID NO: 5749 - RNA, 21 nt, Artificial
  synthetic
uaauaacccuugaaagucaua

SEQ ID NO: 5750 - RNA, 21 nt, Artificial
  synthetic
aauaacccuugaaagucauga

SEQ ID NO: 5751 - RNA, 21 nt, Artificial
  synthetic
aacccuugaaagucaugaaca

SEQ ID NO: 5752 - RNA, 21 nt, Artificial
  synthetic
cuugaaagucaugaacacaua

SEQ ID NO: 5753 - RNA, 21 nt, Artificial
  synthetic
agucaugaacacaucagcuaa

SEQ ID NO: 5754 - RNA, 21 nt, Artificial
  synthetic
gucaugaacacaucagcuaga

SEQ ID NO: 5755 - RNA, 21 nt, Artificial
  synthetic
ucaugaacacaucagcuagca

SEQ ID NO: 5756 - RNA, 21 nt, Artificial
  synthetic
caugaacacaucagcuagcaa

SEQ ID NO: 5757 - RNA, 21 nt, Artificial
  synthetic
caugaacacaucagcuagcaa

SEQ ID NO: 5758 - RNA, 21 nt, Artificial
  synthetic
augaacacaucagcuagcaaa

SEQ ID NO: 5759 - RNA, 21 nt, Artificial
  synthetic
ugaacacaucagcuagcaaaa

SEQ ID NO: 5760 - RNA, 21 nt, Artificial
  synthetic
gaacacaucagcuagcaaaaa

SEQ ID NO: 5761 - RNA, 21 nt, Artificial
  synthetic
aacacaucagcuagcaaaaga

SEQ ID NO: 5762 - RNA, 21 nt, Artificial
  synthetic
caucagcuagcaaaagaagua

SEQ ID NO: 5763 - RNA, 21 nt, Artificial
  synthetic
cuagcaaaagaaguaacaaga

SEQ ID NO: 5764 - RNA, 21 nt, Artificial
  synthetic
guaacaagagugauucuugca

SEQ ID NO: 5765 - RNA, 21 nt, Artificial
  synthetic
uaacaagagugauucuugcua

SEQ ID NO: 5766 - RNA, 21 nt, Artificial
  synthetic
aacaagagugauucuugcuga

SEQ ID NO: 5767 - RNA, 21 nt, Artificial
  synthetic
agagugauucuugcugcuaua

SEQ ID NO: 5768 - RNA, 21 nt, Artificial
  synthetic
gagugauucuugcugcuauua

SEQ ID NO: 5769 - RNA, 21 nt, Artificial
  synthetic
gugauucuugcugcuauuaca

SEQ ID NO: 5770 - RNA, 21 nt, Artificial
  synthetic
uuggaacgcccuuuuacuaaa

SEQ ID NO: 5771 - RNA, 21 nt, Artificial
  synthetic
uggaacgcccuuuuacuaaaa

SEQ ID NO: 5772 - RNA, 21 nt, Artificial
  synthetic
gaacgcccuuuuacuaaacua

SEQ ID NO: 5773 - RNA, 21 nt, Artificial
  synthetic
aacgcccuuuuacuaaacuua

SEQ ID NO: 5774 - RNA, 21 nt, Artificial
  synthetic
acgcccuuuuacuaaacuuga

SEQ ID NO: 5775 - RNA, 21 nt, Artificial
  synthetic
cgcccuuuuacuaaacuugaa

SEQ ID NO: 5776 - RNA, 21 nt, Artificial
  synthetic
guuucaguaaauucuuaccga

SEQ ID NO: 5777 - RNA, 21 nt, Artificial
  synthetic
uuucaguaaauucuuaccgua

SEQ ID NO: 5778 - RNA, 21 nt, Artificial
  synthetic
uucaguaaauucuuaccguca

SEQ ID NO: 5779 - RNA, 21 nt, Artificial
  synthetic
ucaguaaauucuuaccgucaa

SEQ ID NO: 5780 - RNA, 21 nt, Artificial
  synthetic
caguaaauucuuaccgucaaa

SEQ ID NO: 5781 - RNA, 21 nt, Artificial
  synthetic
aguaaauucuuaccgucaaaa

SEQ ID NO: 5782 - RNA, 21 nt, Artificial
  synthetic
guaaauucuuaccgucaaaca

SEQ ID NO: 5783 - RNA, 21 nt, Artificial
  synthetic
uaaauucuuaccgucaaacua

SEQ ID NO: 5784 - RNA, 21 nt, Artificial
  synthetic
aaauucuuaccgucaaacuga

SEQ ID NO: 5785 - RNA, 21 nt, Artificial
  synthetic
aauucuuaccgucaaacugaa

SEQ ID NO: 5786 - RNA, 21 nt, Artificial
  synthetic
auucuuaccgucaaacugaca

SEQ ID NO: 5787 - RNA, 21 nt, Artificial
  synthetic
uucuuaccgucaaacugacga

SEQ ID NO: 5788 - RNA, 21 nt, Artificial
  synthetic
ucuuaccgucaaacugacgga

SEQ ID NO: 5789 - RNA, 21 nt, Artificial
  synthetic
cuuaccgucaaacugacggaa

SEQ ID NO: 5790 - RNA, 21 nt, Artificial
  synthetic
uuaccgucaaacugacggaua

SEQ ID NO: 5791 - RNA, 21 nt, Artificial
  synthetic
uaccgucaaacugacggauua

SEQ ID NO: 5792 - RNA, 21 nt, Artificial
  synthetic
uaccgucaaacugacggauua

SEQ ID NO: 5793 - RNA, 21 nt, Artificial
  synthetic
accgucaaacugacggauuaa

SEQ ID NO: 5794 - RNA, 21 nt, Artificial
  synthetic
aacugacggauuauuauuuaa

SEQ ID NO: 5795 - RNA, 21 nt, Artificial
  synthetic
aguuugaugaggugaucacua

SEQ ID NO: 5796 - RNA, 21 nt, Artificial
  synthetic
acugucuacagugguucaaca

SEQ ID NO: 5797 - RNA, 21 nt, Artificial
  synthetic
cugucuacagugguucaacua

SEQ ID NO: 5798 - RNA, 21 nt, Artificial
  synthetic
cuacagugguucaacuuuuaa

SEQ ID NO: 5799 - RNA, 21 nt, Artificial
  synthetic
uacagugguucaacuuuuaaa

SEQ ID NO: 5800 - RNA, 21 nt, Artificial
  synthetic
ucaacuuuuaaguuaagggaa

SEQ ID NO: 5801 - RNA, 21 nt, Artificial
  synthetic
aacuuuuaaguuaagggaaaa

SEQ ID NO: 5802 - RNA, 21 nt, Artificial
  synthetic
aaaaacuuuuacuuuguagaa

SEQ ID NO: 5803 - RNA, 21 nt, Artificial
  synthetic
cucagucuacgauuucuuuua

SEQ ID NO: 5804 - RNA, 21 nt, Artificial
  synthetic
ucagucuacgauuucuuuuga

SEQ ID NO: 5805 - RNA, 21 nt, Artificial
  synthetic
cagucuacgauuucuuuugaa

SEQ ID NO: 5806 - RNA, 21 nt, Artificial
  synthetic
caugagaaaaguacagaauca

SEQ ID NO: 5807 - RNA, 21 nt, Artificial
  synthetic
caugagaaaaguacagaauca

SEQ ID NO: 5808 - RNA, 21 nt, Artificial
  synthetic
aaauguucagacuuuguugua

SEQ ID NO: 5809 - RNA, 21 nt, Artificial
  synthetic
ugcuaucagugcuaaagugaa

SEQ ID NO: 5810 - RNA, 21 nt, Artificial
  synthetic
cguaugauagcaguuuaucua

SEQ ID NO: 5811 - RNA, 21 nt, Artificial
  synthetic
guaugauagcaguuuaucuua

SEQ ID NO: 5812 - RNA, 21 nt, Artificial
  synthetic
gauaacucagaagaauuuuua

SEQ ID NO: 5813 - RNA, 21 nt, Artificial
  synthetic
auccacuucucacacuucaga

SEQ ID NO: 5814 - RNA, 21 nt, Artificial
  synthetic
ucucacacuucagauuucaaa

SEQ ID NO: 5815 - RNA, 21 nt, Artificial
  synthetic
cucuacuaugccuaaacgcaa

SEQ ID NO: 5816 - RNA, 21 nt, Artificial
  synthetic
ucuacuaugccuaaacgcaua

SEQ ID NO: 5817 - RNA, 21 nt, Artificial
  synthetic
ucgaaaucacagaguuucuga

SEQ ID NO: 5818 - RNA, 21 nt, Artificial
  synthetic
cgaaaucacagaguuucugca

SEQ ID NO: 5819 - RNA, 21 nt, Artificial
  synthetic
guucuacuucugaaucuauga

SEQ ID NO: 5820 - RNA, 21 nt, Artificial
  synthetic
uucuacuucugaaucuaugga

SEQ ID NO: 5821 - RNA, 21 nt, Artificial
  synthetic
ucuacuucugaaucuauggaa

SEQ ID NO: 5822 - RNA, 21 nt, Artificial
  synthetic
cuacuucugaaucuauggaua

SEQ ID NO: 5823 - RNA, 21 nt, Artificial
  synthetic
ugaaucuauggaucaacuaca

SEQ ID NO: 5824 - RNA, 21 nt, Artificial
  synthetic
ugaaucuauggaucaacuaca

SEQ ID NO: 5825 - RNA, 21 nt, Artificial
  synthetic
acuacuaaacaaaaauagaga

SEQ ID NO: 5826 - RNA, 21 nt, Artificial
  synthetic
accaagugcuaaggauucuua

SEQ ID NO: 5827 - RNA, 21 nt, Artificial
  synthetic
uuaggaaaucaacauugaaua

SEQ ID NO: 5828 - RNA, 21 nt, Artificial
  synthetic
agccaacuccaguuuauacua

SEQ ID NO: 5829 - RNA, 21 nt, Artificial
  synthetic
uucuucagcaacucaguacga

SEQ ID NO: 5830 - RNA, 21 nt, Artificial
  synthetic
uuucuacuuugccauuuccaa

SEQ ID NO: 5831 - RNA, 21 nt, Artificial
  synthetic
uucuacuuugccauuuccaca

SEQ ID NO: 5832 - RNA, 21 nt, Artificial
  synthetic
ucuuguaacauccaauaggaa

SEQ ID NO: 5833 - RNA, 21 nt, Artificial
  synthetic
ccgaaacuggaaguuauuuaa

SEQ ID NO: 5834 - RNA, 21 nt, Artificial
  synthetic
ccgaaacuggaaguuauuuaa

SEQ ID NO: 5835 - RNA, 21 nt, Artificial
  synthetic
ccgaaacuggaaguuauuuaa

SEQ ID NO: 5836 - RNA, 21 nt, Artificial
  synthetic
aaacuggaaguuauuuauuua

SEQ ID NO: 5837 - RNA, 21 nt, Artificial
  synthetic
cuugaaagucaugaacacaua

SEQ ID NO: 5838 - RNA, 21 nt, Artificial
  synthetic
cuugaaagucaugaacacaua

SEQ ID NO: 5839 - RNA, 21 nt, Artificial
  synthetic
agucaugaacacaucagcuaa

SEQ ID NO: 5840 - RNA, 21 nt, Artificial
  synthetic
agucaugaacacaucagcuaa

SEQ ID NO: 5841 - RNA, 21 nt, Artificial
  synthetic
agucaugaacacaucagcuaa

SEQ ID NO: 5842 - RNA, 21 nt, Artificial
  synthetic
gucaugaacacaucagcuaga

SEQ ID NO: 5843 - RNA, 21 nt, Artificial
  synthetic
gucaugaacacaucagcuaga

SEQ ID NO: 5844 - RNA, 21 nt, Artificial
  synthetic
caugaacacaucagcuagcaa

SEQ ID NO: 5845 - RNA, 21 nt, Artificial
  synthetic
agagugauucuugcugcuaua

SEQ ID NO: 5846 - RNA, 21 nt, Artificial
  synthetic
agagugauucuugcugcuaua

SEQ ID NO: 5847 - RNA, 21 nt, Artificial
  synthetic
gugauucuugcugcuauuaca

SEQ ID NO: 5848 - RNA, 21 nt, Artificial
  synthetic
gugauucuugcugcuauuaca

SEQ ID NO: 5849 - RNA, 21 nt, Artificial
  synthetic
cgcccuuuuacuaaacuugaa

SEQ ID NO: 5850 - RNA, 21 nt, Artificial
  synthetic
cgcccuuuuacuaaacuugaa

SEQ ID NO: 5851 - RNA, 21 nt, Artificial
  synthetic
uaccgucaaacugacggauua

SEQ ID NO: 5852 - RNA, 21 nt, Artificial
  synthetic
acugucuacagugguucaaca

SEQ ID NO: 5853 - RNA, 21 nt, Artificial
  synthetic
acugucuacagugguucaaca

SEQ ID NO: 5854 - RNA, 21 nt, Artificial
  synthetic
agugguucaacuuuuaaguua

SEQ ID NO: 5855 - RNA, 21 nt, Artificial
  synthetic
gugguucaacuuuuaaguuaa

SEQ ID NO: 5856 - RNA, 21 nt, Artificial
  synthetic
uaagggaaaaacuuuuacuua

SEQ ID NO: 5857 - RNA, 21 nt, Artificial
  synthetic
ccucagccuacgauuucuuua

SEQ ID NO: 5858 - RNA, 21 nt, Artificial
  synthetic
cucagccuacgauuucuuuua

SEQ ID NO: 5859 - RNA, 21 nt, Artificial
  synthetic
ucagccuacgauuucuuuuga

SEQ ID NO: 5860 - RNA, 21 nt, Artificial
  synthetic
gaggaugguucauauacuuaa

SEQ ID NO: 5861 - RNA, 21 nt, Artificial
  synthetic
gaggaugguucauauacuuaa

SEQ ID NO: 5862 - RNA, 21 nt, Artificial
  synthetic
aggaugguucauauacuuaca

SEQ ID NO: 5863 - RNA, 21 nt, Artificial
  synthetic
aaugugaaguacaagugaaaa

SEQ ID NO: 5864 - RNA, 21 nt, Artificial
  synthetic
aaugugaaguacaagugaaaa

SEQ ID NO: 5865 - RNA, 21 nt, Artificial
  synthetic
gugaaguacaagugaaaaaca

SEQ ID NO: 5866 - RNA, 21 nt, Artificial
  synthetic
aaggaguuuuuaaaacauaca

SEQ ID NO: 5867 - RNA, 21 nt, Artificial
  synthetic
aggaguuuuuaaaacauacaa

SEQ ID NO: 5868 - RNA, 21 nt, Artificial
  synthetic
aaacauacaguccuaagugua

SEQ ID NO: 5869 - RNA, 21 nt, Artificial
  synthetic
aacauacaguccuaaguguga

SEQ ID NO: 5870 - RNA, 21 nt, Artificial
  synthetic
acauacaguccuaagugugaa

SEQ ID NO: 5871 - RNA, 21 nt, Artificial
  synthetic
gcugcacaugagaaaaguaca

SEQ ID NO: 5872 - RNA, 21 nt, Artificial
  synthetic
cugcacaugagaaaaguacaa

SEQ ID NO: 5873 - RNA, 21 nt, Artificial
  synthetic
auggagaguguuuuguucaaa

SEQ ID NO: 5874 - RNA, 21 nt, Artificial
  synthetic
ggagaguguuuuguucaaaua

SEQ ID NO: 5875 - RNA, 21 nt, Artificial
  synthetic
uuuguucaaaugcucagacua

SEQ ID NO: 5876 - RNA, 21 nt, Artificial
  synthetic
uguucaaaugcucagacuuca

SEQ ID NO: 5877 - RNA, 21 nt, Artificial
  synthetic
guucaaaugcucagacuucga

SEQ ID NO: 5878 - RNA, 21 nt, Artificial
  synthetic
uucaaaugcucagacuucgua

SEQ ID NO: 5879 - RNA, 21 nt, Artificial
  synthetic
ucaaaugcucagacuucguua

SEQ ID NO: 5880 - RNA, 21 nt, Artificial
  synthetic
caaaugcucagacuucguuga

SEQ ID NO: 5881 - RNA, 21 nt, Artificial
  synthetic
aaaugcucagacuucguugua

SEQ ID NO: 5882 - RNA, 21 nt, Artificial
  synthetic
aaugcucagacuucguuguga

SEQ ID NO: 5883 - RNA, 21 nt, Artificial
  synthetic
acauguuucgauauaaugaaa

SEQ ID NO: 5884 - RNA, 21 nt, Artificial
  synthetic
uuuaucuucauauacgguuca

SEQ ID NO: 5885 - RNA, 21 nt, Artificial
  synthetic
agggacaacucagaagaauua

SEQ ID NO: 5886 - RNA, 21 nt, Artificial
  synthetic
gggacaacucagaagaauuua

SEQ ID NO: 5887 - RNA, 21 nt, Artificial
  synthetic
ggacaacucagaagaauuuca

SEQ ID NO: 5888 - RNA, 21 nt, Artificial
  synthetic
gacaacucagaagaauuucua

SEQ ID NO: 5889 - RNA, 21 nt, Artificial
  synthetic
ugcuucucacacuucagauua

SEQ ID NO: 5890 - RNA, 21 nt, Artificial
  synthetic
gcuucucacacuucagauuua

SEQ ID NO: 5891 - RNA, 21 nt, Artificial
  synthetic
cuucucacacuucagauuuca

SEQ ID NO: 5892 - RNA, 21 nt, Artificial
  synthetic
cuucucacacuucagauuuca

SEQ ID NO: 5893 - RNA, 21 nt, Artificial
  synthetic
uucucacacuucagauuucaa

SEQ ID NO: 5894 - RNA, 21 nt, Artificial
  synthetic
uucucacacuucagauuucaa

SEQ ID NO: 5895 - RNA, 21 nt, Artificial
  synthetic
ucagaccaaagaguaguuaaa

SEQ ID NO: 5896 - RNA, 21 nt, Artificial
  synthetic
ucagaccaaagaguaguuaaa

SEQ ID NO: 5897 - RNA, 21 nt, Artificial
  synthetic
cagaccaaagaguaguuaaua

SEQ ID NO: 5898 - RNA, 21 nt, Artificial
  synthetic
cagaccaaagaguaguuaaua

SEQ ID NO: 5899 - RNA, 21 nt, Artificial
  synthetic
uagaauuuguaucccacaaua

SEQ ID NO: 5900 - RNA, 21 nt, Artificial
  synthetic
agaauuuguaucccacaauca

SEQ ID NO: 5901 - RNA, 21 nt, Artificial
  synthetic
gaauuuguaucccacaaucca

SEQ ID NO: 5902 - RNA, 21 nt, Artificial
  synthetic
gugaaacaucaccuagcuuua

SEQ ID NO: 5903 - RNA, 21 nt, Artificial
  synthetic
ugaaacaucaccuagcuuuua

SEQ ID NO: 5904 - RNA, 21 nt, Artificial
  synthetic
gaaacaucaccuagcuuuuca

SEQ ID NO: 5905 - RNA, 21 nt, Artificial
  synthetic
aaacaucaccuagcuuuucaa

SEQ ID NO: 5906 - RNA, 21 nt, Artificial
  synthetic
aacaucaccuagcuuuucaaa

SEQ ID NO: 5907 - RNA, 21 nt, Artificial
  synthetic
acaucaccuagcuuuucaaaa

SEQ ID NO: 5908 - RNA, 21 nt, Artificial
  synthetic
caucaccuagcuuuucaaaaa

SEQ ID NO: 5909 - RNA, 21 nt, Artificial
  synthetic
aucaccuagcuuuucaaaaga

SEQ ID NO: 5910 - RNA, 21 nt, Artificial
  synthetic
ucaccuagcuuuucaaaagca

SEQ ID NO: 5911 - RNA, 21 nt, Artificial
  synthetic
caccuagcuuuucaaaagcua

SEQ ID NO: 5912 - RNA, 21 nt, Artificial
  synthetic
accuagcuuuucaaaagcuga

SEQ ID NO: 5913 - RNA, 21 nt, Artificial
  synthetic
ccuagcuuuucaaaagcugaa

SEQ ID NO: 5914 - RNA, 21 nt, Artificial
  synthetic
caucugaaucuauggaucaaa

SEQ ID NO: 5915 - RNA, 21 nt, Artificial
  synthetic
aucugaaucuauggaucaaca

SEQ ID NO: 5916 - RNA, 21 nt, Artificial
  synthetic
ucugaaucuauggaucaacua

SEQ ID NO: 5917 - RNA, 21 nt, Artificial
  synthetic
ucugaaucuauggaucaacua

SEQ ID NO: 5918 - RNA, 21 nt, Artificial
  synthetic
cugaaucuauggaucaacuaa

SEQ ID NO: 5919 - RNA, 21 nt, Artificial
  synthetic
cugaaucuauggaucaacuaa

SEQ ID NO: 5920 - RNA, 21 nt, Artificial
  synthetic
aucuauggaucaacuacuaaa

SEQ ID NO: 5921 - RNA, 21 nt, Artificial
  synthetic
ucuauggaucaacuacuaaga

SEQ ID NO: 5922 - RNA, 21 nt, Artificial
  synthetic
cuauggaucaacuacuaagca

SEQ ID NO: 5923 - RNA, 21 nt, Artificial
  synthetic
uauggaucaacuacuaagcaa

SEQ ID NO: 5924 - RNA, 21 nt, Artificial
  synthetic
auggaucaacuacuaagcaaa

SEQ ID NO: 5925 - RNA, 21 nt, Artificial
  synthetic
uggaucaacuacuaagcaaaa

SEQ ID NO: 5926 - RNA, 21 nt, Artificial
  synthetic
ggaucaacuacuaagcaaaaa

SEQ ID NO: 5927 - RNA, 21 nt, Artificial
  synthetic
gaucaacuacuaagcaaaaaa

SEQ ID NO: 5928 - RNA, 21 nt, Artificial
  synthetic
aaggagaaaagucacgagaua

SEQ ID NO: 5929 - RNA, 21 nt, Artificial
  synthetic
ggaguucaacccucguucuua

SEQ ID NO: 5930 - RNA, 21 nt, Artificial
  synthetic
guucaacccucguucuuucua

SEQ ID NO: 5931 - RNA, 21 nt, Artificial
  synthetic
uucaacccucguucuuucuca

SEQ ID NO: 5932 - RNA, 21 nt, Artificial
  synthetic
ucaacccucguucuuucucua

SEQ ID NO: 5933 - RNA, 21 nt, Artificial
  synthetic
caacccucguucuuucucuca

SEQ ID NO: 5934 - RNA, 21 nt, Artificial
  synthetic
aacccucguucuuucucucaa

SEQ ID NO: 5935 - RNA, 21 nt, Artificial
  synthetic
cguucuuucucucagccaaaa

SEQ ID NO: 5936 - RNA, 21 nt, Artificial
  synthetic
guucuuucucucagccaaaga

SEQ ID NO: 5937 - RNA, 21 nt, Artificial
  synthetic
aguccugucauacaagguaaa

SEQ ID NO: 5938 - RNA, 21 nt, Artificial
  synthetic
guccugucauacaagguaaua

SEQ ID NO: 5939 - RNA, 21 nt, Artificial
  synthetic
ugucauacaagguaaugccaa

SEQ ID NO: 5940 - RNA, 21 nt, Artificial
  synthetic
gucauacaagguaaugccaga

SEQ ID NO: 5941 - RNA, 21 nt, Artificial
  synthetic
ucuacuuugccauuuccacca

SEQ ID NO: 5942 - RNA, 21 nt, Artificial
  synthetic
aagcacagaaaacuagaacua

SEQ ID NO: 5943 - RNA, 21 nt, Artificial
  synthetic
gcacagaaaacuagaacuuca

SEQ ID NO: 5944 - RNA, 21 nt, Artificial
  synthetic
acagaaaacuagaacuucaua

SEQ ID NO: 5945 - RNA, 21 nt, Artificial
  synthetic
cagaaaacuagaacuucauua

SEQ ID NO: 5946 - RNA, 21 nt, Artificial
  synthetic
ugcuugcugaaacuggaagua

SEQ ID NO: 5947 - RNA, 21 nt, Artificial
  synthetic
cugaaacuggaaguuauuuaa

SEQ ID NO: 5948 - RNA, 21 nt, Artificial
  synthetic
ugaaacuggaaguuauuuaua

SEQ ID NO: 5949 - RNA, 21 nt, Artificial
  synthetic
gaaacuggaaguuauuuauua

SEQ ID NO: 5950 - RNA, 21 nt, Artificial
  synthetic
gaaacuggaaguuauuuauua

SEQ ID NO: 5951 - RNA, 21 nt, Artificial
  synthetic
uugagagucaugaacacauca

SEQ ID NO: 5952 - RNA, 21 nt, Artificial
  synthetic
agucaugaacacaucagcuaa

SEQ ID NO: 5953 - RNA, 21 nt, Artificial
  synthetic
agucaugaacacaucagcuaa

SEQ ID NO: 5954 - RNA, 21 nt, Artificial
  synthetic
gucaugaacacaucagcuaga

SEQ ID NO: 5955 - RNA, 21 nt, Artificial
  synthetic
gucaugaacacaucagcuaga

SEQ ID NO: 5956 - RNA, 21 nt, Artificial
  synthetic
augaacacaucagcuagcaaa

SEQ ID NO: 5957 - RNA, 21 nt, Artificial
  synthetic
ugaacacaucagcuagcaaca

SEQ ID NO: 5958 - RNA, 21 nt, Artificial
  synthetic
aucagcuagcaacagaaguaa

SEQ ID NO: 5959 - RNA, 21 nt, Artificial
  synthetic
cagcuagcaacagaaguaaca

SEQ ID NO: 5960 - RNA, 21 nt, Artificial
  synthetic
cuagcaacagaaguaacaaga

SEQ ID NO: 5961 - RNA, 21 nt, Artificial
  synthetic
uagcaacagaaguaacaagaa

SEQ ID NO: 5962 - RNA, 21 nt, Artificial
  synthetic
agaaguaacaagagugauuca

SEQ ID NO: 5963 - RNA, 21 nt, Artificial
  synthetic
agaaguaacaagagugauuca

SEQ ID NO: 5964 - RNA, 21 nt, Artificial
  synthetic
cuugcugcuauuaccgcuuua

SEQ ID NO: 5965 - RNA, 21 nt, Artificial
  synthetic
gcugcuauuaccgcuuuaaaa

SEQ ID NO: 5966 - RNA, 21 nt, Artificial
  synthetic
cccuuuuacuaaacuugacaa

SEQ ID NO: 5967 - RNA, 21 nt, Artificial
  synthetic
cuuuuacuaaacuugacagaa

SEQ ID NO: 5968 - RNA, 21 nt, Artificial
  synthetic
uuuuacuaaacuugacagaaa

SEQ ID NO: 5969 - RNA, 21 nt, Artificial
  synthetic
uacuaaacuugacagaaguua

SEQ ID NO: 5970 - RNA, 21 nt, Artificial
  synthetic
cuaaacuugacagaaguucaa

SEQ ID NO: 5971 - RNA, 21 nt, Artificial
  synthetic
acuugacagaaguucaguaaa

SEQ ID NO: 5972 - RNA, 21 nt, Artificial
  synthetic
ugacagaaguucaguaaauua

SEQ ID NO: 5973 - RNA, 21 nt, Artificial
  synthetic
acagaaguucaguaaauucua

SEQ ID NO: 5974 - RNA, 21 nt, Artificial
  synthetic
cagaaguucaguaaauucuua

SEQ ID NO: 5975 - RNA, 21 nt, Artificial
  synthetic
agaaguucaguaaauucuuaa

SEQ ID NO: 5976 - RNA, 21 nt, Artificial
  synthetic
ccaaacugacggauuauuaua

SEQ ID NO: 5977 - RNA, 21 nt, Artificial
  synthetic
guuaagggaaaacuuuuacua

SEQ ID NO: 5978 - RNA, 21 nt, Artificial
  synthetic
uuaagggaaaacuuuuacuua

SEQ ID NO: 5979 - RNA, 21 nt, Artificial
  synthetic
uaagggaaaacuuuuacuuua

SEQ ID NO: 5980 - RNA, 21 nt, Artificial
  synthetic
agggaaaacuuuuacuuugua

SEQ ID NO: 5981 - RNA, 21 nt, Artificial
  synthetic
gggaaaacuuuuacuuuguaa

SEQ ID NO: 5982 - RNA, 21 nt, Artificial
  synthetic
gaaaacuuuuacuuuguagaa

SEQ ID NO: 5983 - RNA, 21 nt, Artificial
  synthetic
aaaacuuuuacuuuguagaua

SEQ ID NO: 5984 - RNA, 21 nt, Artificial
  synthetic
aaaacuuuuacuuuguagaua

SEQ ID NO: 5985 - RNA, 23 nt, Artificial
  synthetic
uacucuuuaccggaagucggagg

SEQ ID NO: 5986 - RNA, 23 nt, Artificial
  synthetic
ugacucuuuaccggaagucggag

SEQ ID NO: 5987 - RNA, 23 nt, Artificial
  synthetic
uggacucuuuaccggaagucgga

SEQ ID NO: 5988 - RNA, 23 nt, Artificial
  synthetic
uuuucacuuguacuucacauuug

SEQ ID NO: 5989 - RNA, 23 nt, Artificial
  synthetic
uuuuucacuuguacuucacauuu

SEQ ID NO: 5990 - RNA, 23 nt, Artificial
  synthetic
uauuuuucacuuguacuucacau

SEQ ID NO: 5991 - RNA, 23 nt, Artificial
  synthetic
ugauucuguacuuuucucaugug

SEQ ID NO: 5992 - RNA, 23 nt, Artificial
  synthetic
uaaucugaagugugagaagugga

SEQ ID NO: 5993 - RNA, 23 nt, Artificial
  synthetic
uaaaucugaagugugagaagugg

SEQ ID NO: 5994 - RNA, 23 nt, Artificial
  synthetic
ugaaaucugaagugugagaagug

SEQ ID NO: 5995 - RNA, 23 nt, Artificial
  synthetic
uugaaaucugaagugugagaagu

SEQ ID NO: 5996 - RNA, 23 nt, Artificial
  synthetic
uuugaaaucugaagugugagaag

SEQ ID NO: 5997 - RNA, 23 nt, Artificial
  synthetic
uguugaaaucugaagugugagaa

SEQ ID NO: 5998 - RNA, 23 nt, Artificial
  synthetic
ugguugaaaucugaagugugaga

SEQ ID NO: 5999 - RNA, 23 nt, Artificial
  synthetic
uggguugaaaucugaagugugag

SEQ ID NO: 6000 - RNA, 23 nt, Artificial
  synthetic
uuucggguugaaaucugaagugu

SEQ ID NO: 6001 - RNA, 23 nt, Artificial
  synthetic
uuuaacuacucuuuggucugaac

SEQ ID NO: 6002 - RNA, 23 nt, Artificial
  synthetic
uauuaacuacucuuuggucugaa

SEQ ID NO: 6003 - RNA, 23 nt, Artificial
  synthetic
uugcguuuaggcauaguagagac

SEQ ID NO: 6004 - RNA, 23 nt, Artificial
  synthetic
uaugcguuuaggcauaguagaga

SEQ ID NO: 6005 - RNA, 23 nt, Artificial
  synthetic
uacaugcguuuaggcauaguaga

SEQ ID NO: 6006 - RNA, 23 nt, Artificial
  synthetic
uuugauccauagauucagaagua

SEQ ID NO: 6007 - RNA, 23 nt, Artificial
  synthetic
uguugauccauagauucagaagu

SEQ ID NO: 6008 - RNA, 23 nt, Artificial
  synthetic
uaguugauccauagauucagaag

SEQ ID NO: 6009 - RNA, 23 nt, Artificial
  synthetic
uuaguugauccauagauucagaa

SEQ ID NO: 6010 - RNA, 23 nt, Artificial
  synthetic
uguaguugauccauagauucaga

SEQ ID NO: 6011 - RNA, 23 nt, Artificial
  synthetic
uaguaguugauccauagauucag

SEQ ID NO: 6012 - RNA, 23 nt, Artificial
  synthetic
uuaguaguugauccauagauuca

SEQ ID NO: 6013 - RNA, 23 nt, Artificial
  synthetic
uuuaguaguugauccauagauuc

SEQ ID NO: 6014 - RNA, 23 nt, Artificial
  synthetic
ucgucauagguauuggguauaaa

SEQ ID NO: 6015 - RNA, 23 nt, Artificial
  synthetic
uuugguacugcucuauaugucuu

SEQ ID NO: 6016 - RNA, 23 nt, Artificial
  synthetic
uuauuugguacugcucuauaugu

SEQ ID NO: 6017 - RNA, 23 nt, Artificial
  synthetic
uauauuugguacugcucuauaug

SEQ ID NO: 6018 - RNA, 23 nt, Artificial
  synthetic
ucauauuugguacugcucuauau

SEQ ID NO: 6019 - RNA, 23 nt, Artificial
  synthetic
uggcauauuugguacugcucuau

SEQ ID NO: 6020 - RNA, 23 nt, Artificial
  synthetic
uuuguaugguaauuugggacaug

SEQ ID NO: 6021 - RNA, 23 nt, Artificial
  synthetic
uuguuguaugguaauuugggaca

SEQ ID NO: 6022 - RNA, 23 nt, Artificial
  synthetic
ucaaaguagaaagaagggcuugu

SEQ ID NO: 6023 - RNA, 23 nt, Artificial
  synthetic
uuggcaaaguagaaagaagggcu

SEQ ID NO: 6024 - RNA, 23 nt, Artificial
  synthetic
uauggcaaaguagaaagaagggc

SEQ ID NO: 6025 - RNA, 23 nt, Artificial
  synthetic
uaauggcaaaguagaaagaaggg

SEQ ID NO: 6026 - RNA, 23 nt, Artificial
  synthetic
uaaauggcaaaguagaaagaagg

SEQ ID NO: 6027 - RNA, 23 nt, Artificial
  synthetic
ugaaauggcaaaguagaaagaag

SEQ ID NO: 6028 - RNA, 23 nt, Artificial
  synthetic
uggaaauggcaaaguagaaagaa

SEQ ID NO: 6029 - RNA, 23 nt, Artificial
  synthetic
uuggaaauggcaaaguagaaaga

SEQ ID NO: 6030 - RNA, 23 nt, Artificial
  synthetic
uguggaaauggcaaaguagaaag

SEQ ID NO: 6031 - RNA, 23 nt, Artificial
  synthetic
uaccauuccugacuguacaugag

SEQ ID NO: 6032 - RNA, 23 nt, Artificial
  synthetic
uaaccauuccugacuguacauga

SEQ ID NO: 6033 - RNA, 23 nt, Artificial
  synthetic
ugaaccauuccugacuguacaug

SEQ ID NO: 6034 - RNA, 23 nt, Artificial
  synthetic
uaugagaaggaaccauuccugac

SEQ ID NO: 6035 - RNA, 23 nt, Artificial
  synthetic
uuggaugagaaggaaccauuccu

SEQ ID NO: 6036 - RNA, 23 nt, Artificial
  synthetic
uguuggaugagaaggaaccauuc

SEQ ID NO: 6037 - RNA, 23 nt, Artificial
  synthetic
uaguuggaugagaaggaaccauu

SEQ ID NO: 6038 - RNA, 23 nt, Artificial
  synthetic
ugcaguuggaugagaaggaacca

SEQ ID NO: 6039 - RNA, 23 nt, Artificial
  synthetic
uauuagcaucauuggcgcauggg

SEQ ID NO: 6040 - RNA, 23 nt, Artificial
  synthetic
ugucauuagcaucauuggcgcau

SEQ ID NO: 6041 - RNA, 23 nt, Artificial
  synthetic
uucgucauuagcaucauuggcgc

SEQ ID NO: 6042 - RNA, 23 nt, Artificial
  synthetic
ugucgucauuagcaucauuggcg

SEQ ID NO: 6043 - RNA, 23 nt, Artificial
  synthetic
uugugucgucauuagcaucauug

SEQ ID NO: 6044 - RNA, 23 nt, Artificial
  synthetic
ucugugucgucauuagcaucauu

SEQ ID NO: 6045 - RNA, 23 nt, Artificial
  synthetic
ugcuguagugcacuuugagcgag

SEQ ID NO: 6046 - RNA, 23 nt, Artificial
  synthetic
uugucgagacuggaaugggcugu

SEQ ID NO: 6047 - RNA, 23 nt, Artificial
  synthetic
uguugucgagacuggaaugggcu

SEQ ID NO: 6048 - RNA, 23 nt, Artificial
  synthetic
uuacaacugcuguuggugguggg

SEQ ID NO: 6049 - RNA, 23 nt, Artificial
  synthetic
uuuacaacugcuguugguggugg

SEQ ID NO: 6050 - RNA, 23 nt, Artificial
  synthetic
ucuuacaacugcuguugguggug

SEQ ID NO: 6051 - RNA, 23 nt, Artificial
  synthetic
ugccuuacaacugcuguuggugg

SEQ ID NO: 6052 - RNA, 23 nt, Artificial
  synthetic
ucagccuuacaacugcuguuggu

SEQ ID NO: 6053 - RNA, 23 nt, Artificial
  synthetic
uguugguagaagcaguagaaggg

SEQ ID NO: 6054 - RNA, 23 nt, Artificial
  synthetic
ucaguugguagaagcaguagaag

SEQ ID NO: 6055 - RNA, 23 nt, Artificial
  synthetic
uccaguugguagaagcaguagaa

SEQ ID NO: 6056 - RNA, 23 nt, Artificial
  synthetic
ucuuccaguugguagaagcagua

SEQ ID NO: 6057 - RNA, 23 nt, Artificial
  synthetic
uguuuucugugcuuccaguuggu

SEQ ID NO: 6058 - RNA, 23 nt, Artificial
  synthetic
uuggauguuacaagaaaucaaca

SEQ ID NO: 6059 - RNA, 23 nt, Artificial
  synthetic
uuauuggauguuacaagaaauca

SEQ ID NO: 6060 - RNA, 23 nt, Artificial
  synthetic
uccuauuggauguuacaagaaau

SEQ ID NO: 6061 - RNA, 23 nt, Artificial
  synthetic
uuccuauuggauguuacaagaaa

SEQ ID NO: 6062 - RNA, 23 nt, Artificial
  synthetic
ucauuccuauuggauguuacaag

SEQ ID NO: 6063 - RNA, 23 nt, Artificial
  synthetic
uagcauuccuauuggauguuaca

SEQ ID NO: 6064 - RNA, 23 nt, Artificial
  synthetic
uuagcauuccuauuggauguuac

SEQ ID NO: 6065 - RNA, 23 nt, Artificial
  synthetic
uuuagcauuccuauuggauguua

SEQ ID NO: 6066 - RNA, 23 nt, Artificial
  synthetic
uguuagcauuccuauuggauguu

SEQ ID NO: 6067 - RNA, 23 nt, Artificial
  synthetic
ugaacuguuagcauuccuauugg

SEQ ID NO: 6068 - RNA, 23 nt, Artificial
  synthetic
uugaacuguuagcauuccuauug

SEQ ID NO: 6069 - RNA, 23 nt, Artificial
  synthetic
ugugaacuguuagcauuccuauu

SEQ ID NO: 6070 - RNA, 23 nt, Artificial
  synthetic
uagugaacuguuagcauuccuau

SEQ ID NO: 6071 - RNA, 23 nt, Artificial
  synthetic
uaagugaacuguuagcauuccua

SEQ ID NO: 6072 - RNA, 23 nt, Artificial
  synthetic
ucaagugaacuguuagcauuccu

SEQ ID NO: 6073 - RNA, 23 nt, Artificial
  synthetic
uacugcaagugaacuguuagcau

SEQ ID NO: 6074 - RNA, 23 nt, Artificial
  synthetic
ucuuccacugcaagugaacuguu

SEQ ID NO: 6075 - RNA, 23 nt, Artificial
  synthetic
ucuaaaugccucuacucggucca

SEQ ID NO: 6076 - RNA, 23 nt, Artificial
  synthetic
uccuaaaugccucuacucggucc

SEQ ID NO: 6077 - RNA, 23 nt, Artificial
  synthetic
uuauggaauuauggaauagcccc

SEQ ID NO: 6078 - RNA, 23 nt, Artificial
  synthetic
uaauaacuuccaguuucggcaag

SEQ ID NO: 6079 - RNA, 23 nt, Artificial
  synthetic
uuaaauaacuuccaguuucggca

SEQ ID NO: 6080 - RNA, 23 nt, Artificial
  synthetic
uauaaauaacuuccaguuucggc

SEQ ID NO: 6081 - RNA, 23 nt, Artificial
  synthetic
uaauaaauaacuuccaguuucgg

SEQ ID NO: 6082 - RNA, 23 nt, Artificial
  synthetic
uaaauaaauaacuuccaguuucg

SEQ ID NO: 6083 - RNA, 23 nt, Artificial
  synthetic
uaugacuuucaaggguuauuaaa

SEQ ID NO: 6084 - RNA, 23 nt, Artificial
  synthetic
ucaugacuuucaaggguuauuaa

SEQ ID NO: 6085 - RNA, 23 nt, Artificial
  synthetic
uguucaugacuuucaaggguuau

SEQ ID NO: 6086 - RNA, 23 nt, Artificial
  synthetic
uauguguucaugacuuucaaggg

SEQ ID NO: 6087 - RNA, 23 nt, Artificial
  synthetic
uuagcugauguguucaugacuuu

SEQ ID NO: 6088 - RNA, 23 nt, Artificial
  synthetic
ucuagcugauguguucaugacuu

SEQ ID NO: 6089 - RNA, 23 nt, Artificial
  synthetic
ugcuagcugauguguucaugacu

SEQ ID NO: 6090 - RNA, 23 nt, Artificial
  synthetic
uugcuagcugauguguucaugac

SEQ ID NO: 6091 - RNA, 23 nt, Artificial
  synthetic
uugcuagcugauguguucaugac

SEQ ID NO: 6092 - RNA, 23 nt, Artificial
  synthetic
uuugcuagcugauguguucauga

SEQ ID NO: 6093 - RNA, 23 nt, Artificial
  synthetic
uuuugcuagcugauguguucaug

SEQ ID NO: 6094 - RNA, 23 nt, Artificial
  synthetic
uuuuugcuagcugauguguucau

SEQ ID NO: 6095 - RNA, 23 nt, Artificial
  synthetic
ucuuuugcuagcugauguguuca

SEQ ID NO: 6096 - RNA, 23 nt, Artificial
  synthetic
uacuucuuuugcuagcugaugug

SEQ ID NO: 6097 - RNA, 23 nt, Artificial
  synthetic
ucuuguuacuucuuuugcuagcu

SEQ ID NO: 6098 - RNA, 23 nt, Artificial
  synthetic
ugcaagaaucacucuuguuacuu

SEQ ID NO: 6099 - RNA, 23 nt, Artificial
  synthetic
uagcaagaaucacucuuguuacu

SEQ ID NO: 6100 - RNA, 23 nt, Artificial
  synthetic
ucagcaagaaucacucuuguuac

SEQ ID NO: 6101 - RNA, 23 nt, Artificial
  synthetic
uauagcagcaagaaucacucuug

SEQ ID NO: 6102 - RNA, 23 nt, Artificial
  synthetic
uaauagcagcaagaaucacucuu

SEQ ID NO: 6103 - RNA, 23 nt, Artificial
  synthetic
uguaauagcagcaagaaucacuc

SEQ ID NO: 6104 - RNA, 23 nt, Artificial
  synthetic
uuuaguaaaagggcguuccaagu

SEQ ID NO: 6105 - RNA, 23 nt, Artificial
  synthetic
uuuuaguaaaagggcguuccaag

SEQ ID NO: 6106 - RNA, 23 nt, Artificial
  synthetic
uaguuuaguaaaagggcguucca

SEQ ID NO: 6107 - RNA, 23 nt, Artificial
  synthetic
uaaguuuaguaaaagggcguucc

SEQ ID NO: 6108 - RNA, 23 nt, Artificial
  synthetic
ucaaguuuaguaaaagggcguuc

SEQ ID NO: 6109 - RNA, 23 nt, Artificial
  synthetic
uucaaguuuaguaaaagggcguu

SEQ ID NO: 6110 - RNA, 23 nt, Artificial
  synthetic
ucgguaagaauuuacugaaacuu

SEQ ID NO: 6111 - RNA, 23 nt, Artificial
  synthetic
uacgguaagaauuuacugaaacu

SEQ ID NO: 6112 - RNA, 23 nt, Artificial
  synthetic
ugacgguaagaauuuacugaaac

SEQ ID NO: 6113 - RNA, 23 nt, Artificial
  synthetic
uugacgguaagaauuuacugaaa

SEQ ID NO: 6114 - RNA, 23 nt, Artificial
  synthetic
uuugacgguaagaauuuacugaa

SEQ ID NO: 6115 - RNA, 23 nt, Artificial
  synthetic
uuuugacgguaagaauuuacuga

SEQ ID NO: 6116 - RNA, 23 nt, Artificial
  synthetic
uguuugacgguaagaauuuacug

SEQ ID NO: 6117 - RNA, 23 nt, Artificial
  synthetic
uaguuugacgguaagaauuuacu

SEQ ID NO: 6118 - RNA, 23 nt, Artificial
  synthetic
ucaguuugacgguaagaauuuac

SEQ ID NO: 6119 - RNA, 23 nt, Artificial
  synthetic
uucaguuugacgguaagaauuua

SEQ ID NO: 6120 - RNA, 23 nt, Artificial
  synthetic
ugucaguuugacgguaagaauuu

SEQ ID NO: 6121 - RNA, 23 nt, Artificial
  synthetic
ucgucaguuugacgguaagaauu

SEQ ID NO: 6122 - RNA, 23 nt, Artificial
  synthetic
uccgucaguuugacgguaagaau

SEQ ID NO: 6123 - RNA, 23 nt, Artificial
  synthetic
uuccgucaguuugacgguaagaa

SEQ ID NO: 6124 - RNA, 23 nt, Artificial
  synthetic
uauccgucaguuugacgguaaga

SEQ ID NO: 6125 - RNA, 23 nt, Artificial
  synthetic
uaauccgucaguuugacgguaag

SEQ ID NO: 6126 - RNA, 23 nt, Artificial
  synthetic
uaauccgucaguuugacgguaag

SEQ ID NO: 6127 - RNA, 23 nt, Artificial
  synthetic
uuaauccgucaguuugacgguaa

SEQ ID NO: 6128 - RNA, 23 nt, Artificial
  synthetic
uuaaauaauaauccgucaguuug

SEQ ID NO: 6129 - RNA, 23 nt, Artificial
  synthetic
uagugaucaccucaucaaacuug

SEQ ID NO: 6130 - RNA, 23 nt, Artificial
  synthetic
uguugaaccacuguagacaguga

SEQ ID NO: 6131 - RNA, 23 nt, Artificial
  synthetic
uaguugaaccacuguagacagug

SEQ ID NO: 6132 - RNA, 23 nt, Artificial
  synthetic
uuaaaaguugaaccacuguagac

SEQ ID NO: 6133 - RNA, 23 nt, Artificial
  synthetic
uuuaaaaguugaaccacuguaga

SEQ ID NO: 6134 - RNA, 23 nt, Artificial
  synthetic
uucccuuaacuuaaaaguugaac

SEQ ID NO: 6135 - RNA, 23 nt, Artificial
  synthetic
uuuucccuuaacuuaaaaguuga

SEQ ID NO: 6136 - RNA, 23 nt, Artificial
  synthetic
uucuacaaaguaaaaguuuuucc

SEQ ID NO: 6137 - RNA, 23 nt, Artificial
  synthetic
uaaaagaaaucguagacugaggc

SEQ ID NO: 6138 - RNA, 23 nt, Artificial
  synthetic
ucaaaagaaaucguagacugagg

SEQ ID NO: 6139 - RNA, 23 nt, Artificial
  synthetic
uucaaaagaaaucguagacugag

SEQ ID NO: 6140 - RNA, 23 nt, Artificial
  synthetic
ugauucuguacuuuucucaugug

SEQ ID NO: 6141 - RNA, 23 nt, Artificial
  synthetic
ugauucuguacuuuucucaugug

SEQ ID NO: 6142 - RNA, 23 nt, Artificial
  synthetic
uacaacaaagucugaacauuuga

SEQ ID NO: 6143 - RNA, 23 nt, Artificial
  synthetic
uucacuuuagcacugauagcaga

SEQ ID NO: 6144 - RNA, 23 nt, Artificial
  synthetic
uagauaaacugcuaucauacgua

SEQ ID NO: 6145 - RNA, 23 nt, Artificial
  synthetic
uaagauaaacugcuaucauacgu

SEQ ID NO: 6146 - RNA, 23 nt, Artificial
  synthetic
uaaaaauucuucugaguuaucuc

SEQ ID NO: 6147 - RNA, 23 nt, Artificial
  synthetic
ucugaagugugagaaguggaucu

SEQ ID NO: 6148 - RNA, 23 nt, Artificial
  synthetic
uuugaaaucugaagugugagaag

SEQ ID NO: 6149 - RNA, 23 nt, Artificial
  synthetic
uugcguuuaggcauaguagagac

SEQ ID NO: 6150 - RNA, 23 nt, Artificial
  synthetic
uaugcguuuaggcauaguagaga

SEQ ID NO: 6151 - RNA, 23 nt, Artificial
  synthetic
ucagaaacucugugauuucgagg

SEQ ID NO: 6152 - RNA, 23 nt, Artificial
  synthetic
ugcagaaacucugugauuucgag

SEQ ID NO: 6153 - RNA, 23 nt, Artificial
  synthetic
ucauagauucagaaguagaacuu

SEQ ID NO: 6154 - RNA, 23 nt, Artificial
  synthetic
uccauagauucagaaguagaacu

SEQ ID NO: 6155 - RNA, 23 nt, Artificial
  synthetic
uuccauagauucagaaguagaac

SEQ ID NO: 6156 - RNA, 23 nt, Artificial
  synthetic
uauccauagauucagaaguagaa

SEQ ID NO: 6157 - RNA, 23 nt, Artificial
  synthetic
uguaguugauccauagauucaga

SEQ ID NO: 6158 - RNA, 23 nt, Artificial
  synthetic
uguaguugauccauagauucaga

SEQ ID NO: 6159 - RNA, 23 nt, Artificial
  synthetic
ucucuauuuuuguuuaguaguug

SEQ ID NO: 6160 - RNA, 23 nt, Artificial
  synthetic
uaagaauccuuagcacuugguuc

SEQ ID NO: 6161 - RNA, 23 nt, Artificial
  synthetic
uauucaauguugauuuccuaacu

SEQ ID NO: 6162 - RNA, 23 nt, Artificial
  synthetic
uaguauaaacuggaguuggcugu

SEQ ID NO: 6163 - RNA, 23 nt, Artificial
  synthetic
ucguacugaguugcugaagaaga

SEQ ID NO: 6164 - RNA, 23 nt, Artificial
  synthetic
uuggaaauggcaaaguagaaaga

SEQ ID NO: 6165 - RNA, 23 nt, Artificial
  synthetic
uguggaaauggcaaaguagaaag

SEQ ID NO: 6166 - RNA, 23 nt, Artificial
  synthetic
uuccuauuggauguuacaagaaa

SEQ ID NO: 6167 - RNA, 23 nt, Artificial
  synthetic
uuaaauaacuuccaguuucggca

SEQ ID NO: 6168 - RNA, 23 nt, Artificial
  synthetic
uuaaauaacuuccaguuucggca

SEQ ID NO: 6169 - RNA, 23 nt, Artificial
  synthetic
uuaaauaacuuccaguuucggca

SEQ ID NO: 6170 - RNA, 23 nt, Artificial
  synthetic
uaaauaaauaacuuccaguuucg

SEQ ID NO: 6171 - RNA, 23 nt, Artificial
  synthetic
uauguguucaugacuuucaaggg

SEQ ID NO: 6172 - RNA, 23 nt, Artificial
  synthetic
uauguguucaugacuuucaaggg

SEQ ID NO: 6173 - RNA, 23 nt, Artificial
  synthetic
uuagcugauguguucaugacuuu

SEQ ID NO: 6174 - RNA, 23 nt, Artificial
  synthetic
uuagcugauguguucaugacuuu

SEQ ID NO: 6175 - RNA, 23 nt, Artificial
  synthetic
uuagcugauguguucaugacuuu

SEQ ID NO: 6176 - RNA, 23 nt, Artificial
  synthetic
ucuagcugauguguucaugacuu

SEQ ID NO: 6177 - RNA, 23 nt, Artificial
  synthetic
ucuagcugauguguucaugacuu

SEQ ID NO: 6178 - RNA, 23 nt, Artificial
  synthetic
uugcuagcugauguguucaugac

SEQ ID NO: 6179 - RNA, 23 nt, Artificial
  synthetic
uauagcagcaagaaucacucuug

SEQ ID NO: 6180 - RNA, 23 nt, Artificial
  synthetic
uauagcagcaagaaucacucuug

SEQ ID NO: 6181 - RNA, 23 nt, Artificial
  synthetic
uguaauagcagcaagaaucacuc

SEQ ID NO: 6182 - RNA, 23 nt, Artificial
  synthetic
uguaauagcagcaagaaucacuc

SEQ ID NO: 6183 - RNA, 23 nt, Artificial
  synthetic
uucaaguuuaguaaaagggcguu

SEQ ID NO: 6184 - RNA, 23 nt, Artificial
  synthetic
uucaaguuuaguaaaagggcguu

SEQ ID NO: 6185 - RNA, 23 nt, Artificial
  synthetic
uaauccgucaguuugacgguaag

SEQ ID NO: 6186 - RNA, 23 nt, Artificial
  synthetic
uguugaaccacuguagacaguga

SEQ ID NO: 6187 - RNA, 23 nt, Artificial
  synthetic
uguugaaccacuguagacaguga

SEQ ID NO: 6188 - RNA, 23 nt, Artificial
  synthetic
uaacuuaaaaguugaaccacugu

SEQ ID NO: 6189 - RNA, 23 nt, Artificial
  synthetic
uuaacuuaaaaguugaaccacug

SEQ ID NO: 6190 - RNA, 23 nt, Artificial
  synthetic
uaaguaaaaguuuuucccuuaac

SEQ ID NO: 6191 - RNA, 23 nt, Artificial
  synthetic
uaaagaaaucguaggcugaggca

SEQ ID NO: 6192 - RNA, 23 nt, Artificial
  synthetic
uaaaagaaaucguaggcugaggc

SEQ ID NO: 6193 - RNA, 23 nt, Artificial
  synthetic
ucaaaagaaaucguaggcugagg

SEQ ID NO: 6194 - RNA, 23 nt, Artificial
  synthetic
uuaaguauaugaaccauccucac

SEQ ID NO: 6195 - RNA, 23 nt, Artificial
  synthetic
uuaaguauaugaaccauccucac

SEQ ID NO: 6196 - RNA, 23 nt, Artificial
  synthetic
uguaaguauaugaaccauccuca

SEQ ID NO: 6197 - RNA, 23 nt, Artificial
  synthetic
uuuucacuuguacuucacauuuc

SEQ ID NO: 6198 - RNA, 23 nt, Artificial
  synthetic
uuuucacuuguacuucacauuuc

SEQ ID NO: 6199 - RNA, 23 nt, Artificial
  synthetic
uguuuuucacuuguacuucacau

SEQ ID NO: 6200 - RNA, 23 nt, Artificial
  synthetic
uguauguuuuaaaaacuccuuca

SEQ ID NO: 6201 - RNA, 23 nt, Artificial
  synthetic
uuguauguuuuaaaaacuccuuc

SEQ ID NO: 6202 - RNA, 23 nt, Artificial
  synthetic
uacacuuaggacuguauguuuua

SEQ ID NO: 6203 - RNA, 23 nt, Artificial
  synthetic
ucacacuuaggacuguauguuuu

SEQ ID NO: 6204 - RNA, 23 nt, Artificial
  synthetic
uucacacuuaggacuguauguuu

SEQ ID NO: 6205 - RNA, 23 nt, Artificial
  synthetic
uguacuuuucucaugugcagcau

SEQ ID NO: 6206 - RNA, 23 nt, Artificial
  synthetic
uuguacuuuucucaugugcagca

SEQ ID NO: 6207 - RNA, 23 nt, Artificial
  synthetic
uuugaacaaaacacucuccauua

SEQ ID NO: 6208 - RNA, 23 nt, Artificial
  synthetic
uauuugaacaaaacacucuccau

SEQ ID NO: 6209 - RNA, 23 nt, Artificial
  synthetic
uagucugagcauuugaacaaaac

SEQ ID NO: 6210 - RNA, 23 nt, Artificial
  synthetic
ugaagucugagcauuugaacaaa

SEQ ID NO: 6211 - RNA, 23 nt, Artificial
  synthetic
ucgaagucugagcauuugaacaa

SEQ ID NO: 6212 - RNA, 23 nt, Artificial
  synthetic
uacgaagucugagcauuugaaca

SEQ ID NO: 6213 - RNA, 23 nt, Artificial
  synthetic
uaacgaagucugagcauuugaac

SEQ ID NO: 6214 - RNA, 23 nt, Artificial
  synthetic
ucaacgaagucugagcauuugaa

SEQ ID NO: 6215 - RNA, 23 nt, Artificial
  synthetic
uacaacgaagucugagcauuuga

SEQ ID NO: 6216 - RNA, 23 nt, Artificial
  synthetic
ucacaacgaagucugagcauuug

SEQ ID NO: 6217 - RNA, 23 nt, Artificial
  synthetic
uuucauuauaucgaaacauguca

SEQ ID NO: 6218 - RNA, 23 nt, Artificial
  synthetic
ugaaccguauaugaagauaaacu

SEQ ID NO: 6219 - RNA, 23 nt, Artificial
  synthetic
uaauucuucugaguugucccuuu

SEQ ID NO: 6220 - RNA, 23 nt, Artificial
  synthetic
uaaauucuucugaguugucccuu

SEQ ID NO: 6221 - RNA, 23 nt, Artificial
  synthetic
ugaaauucuucugaguugucccu

SEQ ID NO: 6222 - RNA, 23 nt, Artificial
  synthetic
uagaaauucuucugaguuguccc

SEQ ID NO: 6223 - RNA, 23 nt, Artificial
  synthetic
uaaucugaagugugagaagcagc

SEQ ID NO: 6224 - RNA, 23 nt, Artificial
  synthetic
uaaaucugaagugugagaagcag

SEQ ID NO: 6225 - RNA, 23 nt, Artificial
  synthetic
ugaaaucugaagugugagaagca

SEQ ID NO: 6226 - RNA, 23 nt, Artificial
  synthetic
ugaaaucugaagugugagaagca

SEQ ID NO: 6227 - RNA, 23 nt, Artificial
  synthetic
uugaaaucugaagugugagaagc

SEQ ID NO: 6228 - RNA, 23 nt, Artificial
  synthetic
uugaaaucugaagugugagaagc

SEQ ID NO: 6229 - RNA, 23 nt, Artificial
  synthetic
uuuaacuacucuuuggucugagc

SEQ ID NO: 6230 - RNA, 23 nt, Artificial
  synthetic
uuuaacuacucuuuggucugagc

SEQ ID NO: 6231 - RNA, 23 nt, Artificial
  synthetic
uauuaacuacucuuuggucugag

SEQ ID NO: 6232 - RNA, 23 nt, Artificial
  synthetic
uauuaacuacucuuuggucugag

SEQ ID NO: 6233 - RNA, 23 nt, Artificial
  synthetic
uauugugggauacaaauucuagg

SEQ ID NO: 6234 - RNA, 23 nt, Artificial
  synthetic
ugauugugggauacaaauucuag

SEQ ID NO: 6235 - RNA, 23 nt, Artificial
  synthetic
uggauugugggauacaaauucua

SEQ ID NO: 6236 - RNA, 23 nt, Artificial
  synthetic
uaaagcuaggugauguuucacuu

SEQ ID NO: 6237 - RNA, 23 nt, Artificial
  synthetic
uaaaagcuaggugauguuucacu

SEQ ID NO: 6238 - RNA, 23 nt, Artificial
  synthetic
ugaaaagcuaggugauguuucac

SEQ ID NO: 6239 - RNA, 23 nt, Artificial
  synthetic
uugaaaagcuaggugauguuuca

SEQ ID NO: 6240 - RNA, 23 nt, Artificial
  synthetic
uuugaaaagcuaggugauguuuc

SEQ ID NO: 6241 - RNA, 23 nt, Artificial
  synthetic
uuuugaaaagcuaggugauguuu

SEQ ID NO: 6242 - RNA, 23 nt, Artificial
  synthetic
uuuuugaaaagcuaggugauguu

SEQ ID NO: 6243 - RNA, 23 nt, Artificial
  synthetic
ucuuuugaaaagcuaggugaugu

SEQ ID NO: 6244 - RNA, 23 nt, Artificial
  synthetic
ugcuuuugaaaagcuaggugaug

SEQ ID NO: 6245 - RNA, 23 nt, Artificial
  synthetic
uagcuuuugaaaagcuaggugau

SEQ ID NO: 6246 - RNA, 23 nt, Artificial
  synthetic
ucagcuuuugaaaagcuagguga

SEQ ID NO: 6247 - RNA, 23 nt, Artificial
  synthetic
uucagcuuuugaaaagcuaggug

SEQ ID NO: 6248 - RNA, 23 nt, Artificial
  synthetic
uuugauccauagauucagaugua

SEQ ID NO: 6249 - RNA, 23 nt, Artificial
  synthetic
uguugauccauagauucagaugu

SEQ ID NO: 6250 - RNA, 23 nt, Artificial
  synthetic
uaguugauccauagauucagaug

SEQ ID NO: 6251 - RNA, 23 nt, Artificial
  synthetic
uaguugauccauagauucagaug

SEQ ID NO: 6252 - RNA, 23 nt, Artificial
  synthetic
uuaguugauccauagauucagau

SEQ ID NO: 6253 - RNA, 23 nt, Artificial
  synthetic
uuaguugauccauagauucagau

SEQ ID NO: 6254 - RNA, 23 nt, Artificial
  synthetic
uuuaguaguugauccauagauuc

SEQ ID NO: 6255 - RNA, 23 nt, Artificial
  synthetic
ucuuaguaguugauccauagauu

SEQ ID NO: 6256 - RNA, 23 nt, Artificial
  synthetic
ugcuuaguaguugauccauagau

SEQ ID NO: 6257 - RNA, 23 nt, Artificial
  synthetic
uugcuuaguaguugauccauaga

SEQ ID NO: 6258 - RNA, 23 nt, Artificial
  synthetic
uuugcuuaguaguugauccauag

SEQ ID NO: 6259 - RNA, 23 nt, Artificial
  synthetic
uuuugcuuaguaguugauccaua

SEQ ID NO: 6260 - RNA, 23 nt, Artificial
  synthetic
uuuuugcuuaguaguugauccau

SEQ ID NO: 6261 - RNA, 23 nt, Artificial
  synthetic
uuuuuugcuuaguaguugaucca

SEQ ID NO: 6262 - RNA, 23 nt, Artificial
  synthetic
uaucucgugacuuuucuccuucu

SEQ ID NO: 6263 - RNA, 23 nt, Artificial
  synthetic
uaagaacgaggguugaacuccuu

SEQ ID NO: 6264 - RNA, 23 nt, Artificial
  synthetic
uagaaagaacgaggguugaacuc

SEQ ID NO: 6265 - RNA, 23 nt, Artificial
  synthetic
ugagaaagaacgaggguugaacu

SEQ ID NO: 6266 - RNA, 23 nt, Artificial
  synthetic
uagagaaagaacgaggguugaac

SEQ ID NO: 6267 - RNA, 23 nt, Artificial
  synthetic
ugagagaaagaacgaggguugaa

SEQ ID NO: 6268 - RNA, 23 nt, Artificial
  synthetic
uugagagaaagaacgaggguuga

SEQ ID NO: 6269 - RNA, 23 nt, Artificial
  synthetic
uuuuggcugagagaaagaacgag

SEQ ID NO: 6270 - RNA, 23 nt, Artificial
  synthetic
ucuuuggcugagagaaagaacga

SEQ ID NO: 6271 - RNA, 23 nt, Artificial
  synthetic
uuuaccuuguaugacaggacugu

SEQ ID NO: 6272 - RNA, 23 nt, Artificial
  synthetic
uauuaccuuguaugacaggacug

SEQ ID NO: 6273 - RNA, 23 nt, Artificial
  synthetic
uuggcauuaccuuguaugacagg

SEQ ID NO: 6274 - RNA, 23 nt, Artificial
  synthetic
ucuggcauuaccuuguaugacag

SEQ ID NO: 6275 - RNA, 23 nt, Artificial
  synthetic
ugguggaaauggcaaaguagaaa

SEQ ID NO: 6276 - RNA, 23 nt, Artificial
  synthetic
uaguucuaguuuucugugcuucc

SEQ ID NO: 6277 - RNA, 23 nt, Artificial
  synthetic
ugaaguucuaguuuucugugcuu

SEQ ID NO: 6278 - RNA, 23 nt, Artificial
  synthetic
uaugaaguucuaguuuucugugc

SEQ ID NO: 6279 - RNA, 23 nt, Artificial
  synthetic
uaaugaaguucuaguuuucugug

SEQ ID NO: 6280 - RNA, 23 nt, Artificial
  synthetic
uacuuccaguuucagcaagcaga

SEQ ID NO: 6281 - RNA, 23 nt, Artificial
  synthetic
uuaaauaacuuccaguuucagca

SEQ ID NO: 6282 - RNA, 23 nt, Artificial
  synthetic
uauaaauaacuuccaguuucagc

SEQ ID NO: 6283 - RNA, 23 nt, Artificial
  synthetic
uaauaaauaacuuccaguuucag

SEQ ID NO: 6284 - RNA, 23 nt, Artificial
  synthetic
uaauaaauaacuuccaguuucag

SEQ ID NO: 6285 - RNA, 23 nt, Artificial
  synthetic
ugauguguucaugacucucaagg

SEQ ID NO: 6286 - RNA, 23 nt, Artificial
  synthetic
uuagcugauguguucaugacucu

SEQ ID NO: 6287 - RNA, 23 nt, Artificial
  synthetic
uuagcugauguguucaugacucu

SEQ ID NO: 6288 - RNA, 23 nt, Artificial
  synthetic
ucuagcugauguguucaugacuc

SEQ ID NO: 6289 - RNA, 23 nt, Artificial
  synthetic
ucuagcugauguguucaugacuc

SEQ ID NO: 6290 - RNA, 23 nt, Artificial
  synthetic
uuugcuagcugauguguucauga

SEQ ID NO: 6291 - RNA, 23 nt, Artificial
  synthetic
uguugcuagcugauguguucaug

SEQ ID NO: 6292 - RNA, 23 nt, Artificial
  synthetic
uuacuucuguugcuagcugaugu

SEQ ID NO: 6293 - RNA, 23 nt, Artificial
  synthetic
uguuacuucuguugcuagcugau

SEQ ID NO: 6294 - RNA, 23 nt, Artificial
  synthetic
ucuuguuacuucuguugcuagcu

SEQ ID NO: 6295 - RNA, 23 nt, Artificial
  synthetic
uucuuguuacuucuguugcuagc

SEQ ID NO: 6296 - RNA, 23 nt, Artificial
  synthetic
ugaaucacucuuguuacuucugu

SEQ ID NO: 6297 - RNA, 23 nt, Artificial
  synthetic
ugaaucacucuuguuacuucugu

SEQ ID NO: 6298 - RNA, 23 nt, Artificial
  synthetic
uaaagcgguaauagcagcaagaa

SEQ ID NO: 6299 - RNA, 23 nt, Artificial
  synthetic
uuuuaaagcgguaauagcagcaa

SEQ ID NO: 6300 - RNA, 23 nt, Artificial
  synthetic
uugucaaguuuaguaaaagggcg

SEQ ID NO: 6301 - RNA, 23 nt, Artificial
  synthetic
uucugucaaguuuaguaaaaggg

SEQ ID NO: 6302 - RNA, 23 nt, Artificial
  synthetic
uuucugucaaguuuaguaaaagg

SEQ ID NO: 6303 - RNA, 23 nt, Artificial
  synthetic
uaacuucugucaaguuuaguaaa

SEQ ID NO: 6304 - RNA, 23 nt, Artificial
  synthetic
uugaacuucugucaaguuuagua

SEQ ID NO: 6305 - RNA, 23 nt, Artificial
  synthetic
uuuacugaacuucugucaaguuu

SEQ ID NO: 6306 - RNA, 23 nt, Artificial
  synthetic
uaauuuacugaacuucugucaag

SEQ ID NO: 6307 - RNA, 23 nt, Artificial
  synthetic
uagaauuuacugaacuucuguca

SEQ ID NO: 6308 - RNA, 23 nt, Artificial
  synthetic
uaagaauuuacugaacuucuguc

SEQ ID NO: 6309 - RNA, 23 nt, Artificial
  synthetic
uuaagaauuuacugaacuucugu

SEQ ID NO: 6310 - RNA, 23 nt, Artificial
  synthetic
uauaauaauccgucaguuuggcg

SEQ ID NO: 6311 - RNA, 23 nt, Artificial
  synthetic
uaguaaaaguuuucccuuaacuu

SEQ ID NO: 6312 - RNA, 23 nt, Artificial
  synthetic
uaaguaaaaguuuucccuuaacu

SEQ ID NO: 6313 - RNA, 23 nt, Artificial
  synthetic
uaaaguaaaaguuuucccuuaac

SEQ ID NO: 6314 - RNA, 23 nt, Artificial
  synthetic
uacaaaguaaaaguuuucccuua

SEQ ID NO: 6315 - RNA, 23 nt, Artificial
  synthetic
uuacaaaguaaaaguuuucccuu

SEQ ID NO: 6316 - RNA, 23 nt, Artificial
  synthetic
uucuacaaaguaaaaguuuuccc

SEQ ID NO: 6317 - RNA, 23 nt, Artificial
  synthetic
uaucuacaaaguaaaaguuuucc

SEQ ID NO: 6318 - RNA, 23 nt, Artificial
  synthetic
uaucuacaaaguaaaaguuuucc

SEQ ID NO: 6319 - RNA, 21 nt, Artificial
  synthetic
aacaguguucuugcucuauaa

SEQ ID NO: 6320 - RNA, 21 nt, Artificial
  synthetic
aacaguguucuugcucuauaa

SEQ ID NO: 6321 - RNA, 23 nt, Artificial
  synthetic
uuauagagcaagaacacuguuuu

SEQ ID NO: 6322 - RNA, 23 nt, Artificial
  synthetic
uuauagagcaagaacacuguuuu

SEQ ID NO: 6323 - DNA, 23 bp, Artificial
  synthetic
agauuctguacuuuucucaugug
